(19) United States
(12) Patent Application Publication
(10) Pub. No.: US 2024/0271201 A1
(43) Pub. Date: Aug. 15, 2024

(54) SEQUENCING CONTROLS

(71) Applicant: Garvan Institute of Medical Research, Darlinghurst (AU)

(72) Inventor: Timothy Mercer, Brisbane (AU)

(73) Assignee: Garvan Institute of Medical Research, Darlinghurst (AU)

(21) Appl. No.: 18/412,450

(22) Filed: Jan. 12, 2024

Related U.S. Application Data
(63) Continuation of application No. 17/127,159, filed on Dec. 18, 2020.
Application No. 17/127,159 is a continuation of application No. 15/535,768, filed on Jun. 14, 2017, now abandoned.

(30) Foreign Application Priority Data
Dec. 16, 2014 (AU) 2014905092
Sep. 24, 2015 (AU) 2015903892

(51) Int. Cl. C12Q 1/6869; C07H 21/04; C12N 15/01; C12N 15/11

(52) U.S. Cl. CPC C12Q 1/6869; C07H 21/04; C12N 15/01; C12N 15/11

(57) ABSTRACT

The present disclosure generally relates to artificial controls for genetic sequencing and quantitation assays, which can be used to calibrate a wide variety of genetic sequencing and quantitation methods. For example, the controls disclosed herein can be used to calibrate a wide variety of high throughput sequencing methods (for example, those referred to as next generation sequencing methods). The present disclosure also generally relates to the use of the sequencing controls in a wide variety of applications including, for example, in the calibration of a wide variety of sequencing methods.

### CROSS-REFERENCE TO RELATED APPLICATIONS

[0001] This application is a continuation of and claims priority under 35 U.S.C. § 120 to U.S. patent application Ser. No. 17/127,159, filed Dec. 18, 2020, titled “SEQUENCING CONTROLS”, which is a continuation filing of U.S. patent application Ser. No. 15/535,768, filed on Jun. 14, 2017, which is itself a National Stage Entry of International PCT application No. PCT/AU2015/050797, filed on Dec. 15, 2015, which itself claims the benefit of priority to Australian application No. 2015903892 filed on Sep. 24, 2015, and Australian application No. 2014905092, filed on Dec. 16, 2014, each which is hereby incorporated by reference in its entirety

### DESCRIPTION OF THE TEXT FILE SUBMITTED ELECTRONICALLY

[0002] The contents of the electronic sequence listing (S227470001US02-SEQ-DGR.xml; Size: 1,003,069 bytes; and Date of Creation: Dec. 29, 2023) is herein incorporated by reference in its entirety.

### TECHNICAL FIELD

[0003] The present disclosure generally relates to sequencing controls (or “standards”), which can be used to calibrate a wide variety of sequencing methods. For example, the sequencing controls disclosed herein can be used to calibrate a wide variety of high throughput sequencing methods (for example, those referred to as next generation sequencing methods). The present disclosure also generally relates to the use of the sequencing controls in a wide variety of applications including, for example, in the calibration of a wide variety of sequencing methods.

### BACKGROUND

[0004] Next-generation sequencing (NGS) technologies (exemplified by services and products provided by companies such as Illumina, Nanopore, PacBio, Ion Torrent, Roche 454 Pyrosequencing (see, e.g., Bentley, D. R. et al., 2008; Clarke, J. et al., 2009; Ronaghi, M. et al., 1998; Eid, J. et al., 2009; Rothberg, J. M. et al., 2011) and others) enable the high-throughput, massively parallel sequencing of nucleic acid molecules. These technologies have the capacity to determine the nucleotide base sequence of millions of RNA and DNA molecules within a single sample. Furthermore, the rate at which individual RNA or DNA sequences are determined is proportional to the relative abundance of that individual RNA or DNA sequence within the sample. Therefore, NGS can also be used to determine the quantity of one or more nucleic acid sequences within a sample.

[0005] NGS is widely used to determine the sequence and/or measure the quantities of nucleic acids found within samples taken from natural sources, such as animals, plants, microorganisms, or the diverse population of microbes within an environmental sample (Edwards, R. A. et al., 2006). These uses include the determination of an organism's full genome sequence (see, e.g., Bentley, D. R. et al., 2008), the determination of the sequence and abundance of messenger RNA present within a sample (see, e.g., Mortazavi, A. et al., 2008), or the sequencing and measurement of a range of cellular features, such as epigenetic modifications (see, e.g., Bernstein, B. E. et al., 2005), protein binding sites (see, e.g., Johnson, D. S., et al., 2007), and three-dimensional DNA structure (see, e.g., Lieberman-Aiden, E. et al., 2009), and other features.

[0006] The millions of individual RNA or DNA sequences determined by NGS can be merged by de novo assembly into longer sequences (called contigs) or matched to a known reference sequence. De novo assembly of DNA sequences can be used to assemble an organism's genome; de novo assembly of RNA sequences can indicate gene sequence, length and isoforms. The matching or alignment of DNA sequences to a reference genome can identify the location of genetic differences or variation between individuals. The location of matches between DNA sequences and the reference genome can indicate locations of epigenetic features, such as histone modifications, or protein binding sites. Alignment of RNA sequences to a reference genome can indicate the existence of intron sequences that are excised during the process of gene splicing.

[0007] In some instances, during the operation of such sequencing methods, nucleic acids of known quantities or sequences, termed standards, have been added (or “spiked-in”) to a natural sample of nucleic acids. The resultant combined mixture may then be analysed using a range of genetic technologies (such as NGS technologies), including microarray technologies, quantitative polymerase chain reaction methods, and others. The quantities or sequences of the sample nucleic acids can be compared to the known quantities or sequences of the added nucleic acid standards, in order to provide a reference scale that can be used to measure and determine the quantities or sequences of a natural sample of nucleic acids.

[0008] Currently used RNA and DNA standards are derived from natural sources. For example, a DNA sequence extracted from the NA12878 cell line originally derived from a Caucasian female human has been extensively characterized and has been used to assess the performance of analytical tools to identify genetic variation (Zook, J. M. et al., 2014). Ribonucleic-acid standards (known as ERCC Spike-Ins) containing sequences derived from the archaea Methanocaldococcus jannaschii were developed for microarrays and qRT-PCR technologies (Baker, S. C. et al., 2005; Consortium, E. R. C., 2005) and have been used with RNA sequencing (Jiang, L. et al., 2011).

[0009] However, the disadvantage of nucleic acid standards that have been derived from natural sources is that they often cannot be added directly to samples because they share homologous sequences with the nucleic acid sequences of interest in the sample. The use of nucleic acid standards that have been derived from natural sources results in a failure to be able to distinguish the standards from the homologous sequences of interest that are present in the sample. Accordingly, the value of such standards as a tool to calibrate the sequencing methods applied to the sample of interest is limited and there remains a need for alternative and improved sequencing controls.

### SUMMARY

[0010] The present inventors have developed novel, artificial sequencing controls that can be used separately or in conjunction with an artificial chromosome. The term “controls” is used herein interchangeably with the term “standards”. Thus, the present disclosure provides novel, artificial sequencing standards.

[0011] In one aspect, the present disclosure provides an artificial chromosome comprising an artificial polynucleotide sequence, wherein any fragment of the artificial polynucleotide sequence is distinguishable from any known naturally occurring genomic sequence. The fragment may be of any size from 20 to 10,000,000 contiguous nucleotides. In one example, the fragment is 1,000 or more nucleotides in length. In another example, the fragment is 100 or more nucleotides in length. In another example, the fragment is 21 or more nucleotides in length.

[0012] In the artificial chromosome disclosed herein, any 1,000 contiguous nucleotides of the artificial polynucleotide sequence can have less than 100% sequence identity with any known naturally occurring genomic sequence of the same length. In another example, any 100 contiguous nucleotides of the artificial polynucleotide sequence can have less than 100% sequence identity with any known naturally occurring genomic sequence of the same length. In another example, any 21 contiguous nucleotides of the artificial polynucleotide sequence can have less than 100% sequence identity with any known naturally occurring genomic sequence of the same length. In another example, any 20 contiguous nucleotides of the artificial polynucleotide sequence can have less than 100% sequence identity with any known naturally occurring genomic sequence of the same length.

[0013] In another example, in the artificial chromosome disclosed herein, any 1,000 or more contiguous nucleotides of the artificial polynucleotide sequence can have less than 100% sequence identity with any known naturally occurring genomic sequence of the same length. In another example, any 100 or more contiguous nucleotides of the artificial polynucleotide sequence can have less than 100% sequence identity with any known naturally occurring genomic sequence of the same length. In another example, any 21 or more contiguous nucleotides of the artificial polynucleotide sequence can have less than 100% sequence identity with any known naturally occurring genomic sequence of the same length. In another example, any 20 or more contiguous nucleotides of the artificial polynucleotide sequence can have less than 100% sequence identity with any known naturally occurring genomic sequence of the same length.

[0014] The artificial chromosome disclosed herein can comprise any one or more features of naturally occurring eukaryotic chromosomes selected from the group consisting of gene loci, CpG islands, mobile elements, repetitive polynucleotide features, small scale genetic variation and large scale genetic variation. The artificial polynucleotide sequence can comprise multiple gene loci; the repetitive polynucleotide features can comprise any one or more of terminal repeats, tandem repeats, inverted repeats and interspersed repeats; the gene loci can comprise immune receptor gene loci; the small scale genetic variation can comprise one or more SNPs, one or more insertions, one or more deletions, one or more microsatellites and/or multiple nucleotide polymorphisms; and/or the large scale genetic variation can comprise one or more deletions, one or more duplications, one or more copy-number variants, one or more insertions, one or more inversions and/or one or more translocations.

[0015] Alternatively or in addition, the artificial chromosome disclosed herein can comprise one or more features of naturally occurring prokaryotic chromosomes. For example, the artificial chromosome may comprise any one or more features of naturally occurring prokaryote chromosomes selected from the group consisting of gene loci, DNA repeats, mobile elements, and operons.

[0016] The present disclosure also provides a fragment of the artificial chromosome disclosed herein, which comprises from 20 to 10,000,000 contiguous nucleotides of the artificial polynucleotide sequence. The fragment may be an RNA fragment or a DNA fragment.

[0017] The present disclosure also provides an artificial polynucleotide sequence comprising two or more fragments of the present disclosure conjoined to form a contiguous polynucleotide sequence. The artificial polynucleotide sequence may be an RNA or a DNA polynucleotide sequence.

[0018] The present disclosure also provides a vector comprising a DNA fragment of the artificial chromosome disclosed herein, which fragment comprises from 20 to 10,000,000 contiguous nucleotides of the artificial polynucleotide sequence.

[0019] The present disclosure also provides a vector comprising the artificial polynucleotide sequence disclosed herein, which artificial polynucleotide sequence is a DNA polynucleotide sequence.

[0020] The present disclosure also provides a method of making a fragment disclosed herein, the method comprising excising the fragment from the vector disclosed herein by endonuclease digestion, amplification or transcribing the DNA fragment comprised within the vector disclosed herein. In one example, the amplification may be polymerase-chain amplification. The present disclosure also provides a method of making a fragment disclosed herein, the method comprising producing the fragment by DNA synthesis.

[0021] The present disclosure also provides a fragment of an artificial chromosome made by a method disclosed herein. Thus, the present disclosure provides a fragment of an artificial chromosome made by a method comprising excising the fragment from the vector of the present disclosure by endonuclease digestion, or transcribing a DNA fragment comprised within the vector of the present disclosure.

[0022] The present disclosure also provides a method of making the artificial polynucleotide sequence disclosed herein, the method comprising excising the artificial polynucleotide sequence from the vector disclosed herein by endonuclease digestion, amplification, or transcribing the artificial polynucleotide sequence comprised within the vector disclosed herein. In one example, the amplification may be polymerase-chain amplification. The present disclosure also provides a method of making the artificial polynucleotide sequence disclosed herein, the method comprising producing the artificial polynucleotide sequence by DNA synthesis.

[0023] The present disclosure also provides an artificial polynucleotide sequence made by a method disclosed herein. Thus, the present disclosure provides an artificial polynucleotide sequence made by a method comprising excising the an artificial polynucleotide sequence from the vector of the present disclosure by endonuclease digestion, or transcribing a DNA of an artificial polynucleotide sequence comprised within the vector of the present disclosure.

[0024] The present disclosure also provides the use of the artificial chromosome disclosed herein and/or the fragment disclosed herein and/or the artificial polynucleotide sequence disclosed herein to calibrate a polynucleotide sequencing process. A wide variety of sequencing processes may be calibrated in this regard.

[0025] The present disclosure also provides a method of calibrating a polynucleotide sequencing process, comprising:
[0026] i) adding one or more fragment disclosed herein and/or one or more artificial polynucleotide sequence disclosed herein to a sample comprising a target polynucleotide sequence to be determined;
[0027] ii) determining the sequence of the target polynucleotide;
[0028] iii) determining the sequence of the one or more fragment disclosed herein and/or the one or more artificial polynucleotide sequence disclosed herein; and
[0029] iv) comparing the sequence determined in iii) to an original sequence of the fragment and/or the artificial polynucleotide sequence, which original sequence is present in the artificial chromosome disclosed herein;
   wherein the accuracy of the sequence determination in iii) is used to calibrate the sequence determination in ii). The polynucleotide sequencing process may be, for example, a polynucleotide alignment, polynucleotide assembly, or other known sequencing process.

[0030] The present disclosure also provides the use of the artificial chromosome disclosed herein and/or the fragment disclosed herein and/or the artificial polynucleotide sequence disclosed herein to calibrate a polynucleotide quantitation process.

[0031] The present disclosure also provides a method of calibrating a polynucleotide quantitation process, comprising:
[0032] i) adding a known amount of one or more fragment disclosed herein and/or one or more artificial polynucleotide sequence disclosed herein to a sample comprising a target polynucleotide sequence to be determined;
[0033] ii) determining the quantity of the target polynucleotide;
[0034] iii) determining the quantity of the one or more fragment disclosed herein and/or the one or more artificial polynucleotide sequence disclosed herein; and
[0035] iv) comparing the quantity of the one or more fragment and/or the one or more artificial polynucleotide sequence determined in iii) to the known amount of the one or more fragment and/or the one or more artificial polynucleotide sequence in i);
   wherein the accuracy of the quantity determination in iii) is used to calibrate the quantity determination in ii).

[0036] The present disclosure also provides the use of the artificial chromosome disclosed herein and/or the fragment disclosed herein and/or the artificial polynucleotide sequence disclosed herein to calibrate a polynucleotide amplification process.

[0037] The present disclosure also provides a method of calibrating a polynucleotide amplification process, comprising:
[0038] i) adding a known amount of one or more fragment disclosed herein and/or one or more artificial polynucleotide sequence disclosed herein to a sample comprising a target polynucleotide sequence to be determined;
[0039] ii) amplifying the target polynucleotide;
[0040] iii) amplifying the one or more fragment disclosed herein and/or the one or more artificial polynucleotide sequence disclosed herein; and
[0041] iv) comparing amplified regions of the one or more fragment and/or the one or more artificial polynucleotide sequence amplified in iii) to amplified regions of the target polynucleotide amplified in ii);
   wherein the amplification in iii) is used to calibrate the amplification in ii).

[0042] In any of the methods disclosed herein, two or more fragments (or standards) disclosed herein may be added to a sample at the same or different concentrations. This has the advantage of permitting the replication of natural states of homozygosity or heterozygosity, or heterogeneity (e.g., replicating the rare mutant allele frequency of impure samples that contain both normal and tumour cells; e.g. replicating complex allele frequencies resulting from chromosomal polyploidy; e.g. replicating a fetal genotype against a background of maternal genotype in circulating DNA).

[0043] The present disclosure also provides a kit comprising one or more artificial chromosome disclosed herein and one or more fragment as disclosed herein or one or more artificial polynucleotide sequence disclosed herein.

[0044] The present disclosure also provides a computer programmable medium containing one or more artificial chromosome disclosed herein stored thereon.

[0045] The present disclosure also provides a computer implemented method for generating an artificial chromosome comprising an artificial polynucleotide sequence, the computer implemented method comprising:
[0046] generating initial data indicative of an initial polynucleotide sequence;
[0047] determining a matching value indicative of a similarity between the initial polynucleotide sequence and one or more known naturally occurring polynucleotide sequence;
[0048] modifying the initial data based on the matching value to determine modified data indicative of a modified polynucleotide sequence such that the modified polynucleotide sequence is distinguishable from any known naturally occurring genomic sequence; and
[0049] storing the modified data on a data store.

[0050] In the computer implemented method disclosed herein, modifying the initial data may comprise shuffling the initial data.

[0051] The present disclosure also provides a computer implemented method of calibrating a polynucleotide sequencing process, the computer implemented method comprising:
[0052] receiving first data relating to a target polynucleotide sequence;
[0053] receiving second data indicative of one or more fragment of an artificial chromosome as disclosed herein and/or one or more artificial polynucleotide sequence disclosed herein; determining based on the second data a quantitative value related to a property of the one or more fragment or the one or more artificial polynucleotide sequence relative to a property of the artificial chromosome, which quantitative value is indicative of an accuracy of determining the property of the one or more fragment and/or the one or more artificial polynucleotide sequence; and
[0054] adjusting a property related to the first data based on the quantitative value to determine a calibrated property of the target polynucleotide sequence.

[0055] The computer implemented method may further comprise generating the first and/or second data; and storing the first and/or second data on a data store.

[0056] The present disclosure also provides a computer system for calibrating a polynucleotide sequencing process, the computer system comprising:
[0057] a data port to receive
   [0058] first data relating to a target polynucleotide sequence,
   [0059] second data indicative of one or more fragment of an artificial chromosome as disclosed herein and/or one or more artificial polynucleotide sequence disclosed herein; and
[0060] a processor to
   [0061] determine based on the second data a first quantitative value related to a property of the one or more fragment and/or the one or more artificial polynucleotide sequence relative to a property of the artificial chromosome, which quantitative value is indicative of an accuracy of determining the property of the one or more fragment and/or the artificial polynucleotide sequence, and
   [0062] adjust the first data based on the quantitative value to determine a calibrated property of the target polynucleotide sequence.

[0063] Each feature of any particular aspect or embodiment or example of the present disclosure may be applied mutatis mutandis to any other aspect or embodiment or example of the present disclosure.

### BRIEF DESCRIPTION OF DRAWINGS

[0064] The following figures further demonstrate certain aspects of the present disclosure. The disclosure may be better understood by reference to one or more of these figures in combination with the detailed description of specific embodiments presented herein.

[0065] FIG. 1 illustrates potential structural features of an artificial chromosome of the present disclosure. The exemplified artificial chromosome contains features including (from top to bottom) genes, large-scale structural variation, disease-associated variation events, DNA repeat elements (including centromeres and telomeres), immune receptor loci, small-scale variation (e.g., <50 nt) such as single nucleotide polymorphisms (SNPs), insertions or deletions (InDels); and mobile elements-derived sequences.

[0066] FIG. 2 illustrates the creation of an artificial chromosome by shuffling sequence to remove homology to any known natural sequence. The known DNA sequence (panel A) overlapping the CpG island (black box shown in panel A) in the promoter of the HOXA1 gene was shuffled with a window size of 50 nt. This removed homology with known or natural sequence (panel B), whilst maintaining high CpG dinucleotide content that defined the CpG Island (white box in panel B) at resolution of 50 nt.

[0067] FIG. 3 illustrates a gene locus (panel A) comprising intervening exon and intron sequences within the artificial chromosome. (B) Alternative inclusion of exons can generate a number of different isoforms from a single gene locus. The lower panel (C) shows RNA standards generated to include the contiguous exonic sequences (with the intervening introns removed). RNA standards can be generated to represent different isoforms, with consensus exons (shaded) and alternative exons (white) indicated. By combining RNA standards representing alternative isoforms together at a range of concentrations, the biological process of alternative splicing is emulated.

[0068] FIG. 4 illustrates the generation of a mobile element for inclusion in the artificial chromosome of the present disclosure. (A) Initially the sequence corresponding to a single copy of a mobile element (grey box) is retrieved from the human genome. Homology is removed to form an artificial, ancient mobile element (white box). (B) Multiple artificial mobile elements undergo further nucleotide substitution, insertion or deletion in parallel to model individual sequence divergence. Multiple artificial mobile elements are then assembled with the artificial chromosome. (C) DNA standards can be produced to represent the mobile element insertion. (D) Sequencing, alignment to the artificial chromosome (indicated by sequenced reads and histogram of sequence coverage) and analysis is able identify this mobile element.

[0069] FIG. 5 illustrates the generation of particular examples of artificial DNA repeats which can be included in the artificial chromosome of the present disclosure. (A) Initially the sequence corresponding to a single copy of a DNA repeat of interest (such as a microsatellite, telomere or centromere repeat unit) is retrieved from the human genome. Homology is removed to form an artificial (“ancestral”) mobile repeat element (white box). (B) The artificial mobile element is amplified. (C) Amplified artificial mobile elements undergo multiple nucleotide changes in parallel to model individual sequence divergence. (D) The artificial mobile element can be asymmetrically amplified. (E) The artificial sequence undergoes multiple amplification and nucleotide modification cycles to form large tandem DNA duplications with multiple subsets of repeats with varying copy number. (E) DNA standards can be produced that represent the different repeat subsets, with DNA standard abundance being proportional to repeat copy number.

[0070] FIG. 6 illustrates the generation of artificial small-scale genetic variation which can be included in the artificial chromosomes of the present disclosure. (A) Small-scale genetic variation, including single-nucleotide polymorphisms, insertions, deletions etc., can be introduced into an artificial chromosome to form variant artificial chromosomes harbouring small-scale nucleotide variation. (B) Multiple DNA standards can be produced matching each variant artificial chromosome sequence, thereby emulating heterozygous or homozygous allele frequency. (C) Illustrates sequencing of the DNA standard, alignment to the reference artificial chromosome and analysis to identify the small-scale variation.

[0071] FIG. 7 illustrates the generation of artificial disease associated genetic variation in the artificial chromosomes of the present disclosure. (A) The sequence overlapping the site of the BRAF mutation V600E was retrieved from the human genome. The surrounding sequence was shuffled with increasing window size with increasing distance from the site of BRAF V600E mutation. The 12 nucleotide sequence surrounding the site of the BRAF V600E mutation was not shuffled. The shuffled sequence was assembled within the artificial chromosomes, producing a variant artificial chromosome sequence. DNA standards matching both the wild-type and disease associated BRAF V600E mutation were produced and combined to emulate homozygous or heterozygous genotype. (B) Scatter-plot illustrates the relationship between depth of sequence read coverage over variation compared to the relative dilution of the variant DNA standards to the reference DNA standard. (C) Scatter-plot illustrates the confidence associated with the assigned genotype (homozygous and heterozygous genotypes indicated) compared to the relative dilution of the variant DNA standard to the reference DNA standard.

[0072] FIG. 8 illustrates the artificial large-scale genetic variation which can be incorporated in the artificial chromosomes of the present disclosure. Illustrated are examples of DNA standards that enable the measurement of different types of large-scale variation including (A) insertions, (B) deletions, (C) inversions, (D) tandem duplications and (E) mobile element insertions where the relative abundance of DNA standards can emulate features such as copy number variation in and between artificial chromosomes.

[0073] FIG. 9 illustrates a translocation which can be incorporated in the artificial chromosomes of the present disclosure. (A) The sequence between two different artificial chromosomes can be rearranged during a translocation. In the illustrated example, a fusion gene is generated when the translocation breakpoint occurs within two artificial genes (A1 and B1). Three RNA standards can be produced that represent the two normal genes and the fusion gene sequence and combined at different relative concentrations to emulate homozygous and heterozygous genotypes. (B) Scatter-plot illustrates the abundance of the fusion gene RNA standard (measured as reads per million (RPM) overlapping the fusion intron junction) compared to the fractional dilution of the fusion gene RNA standard relative to the two normal gene isoforms RNA standards. This scatter-plot indicates the quantitative accuracy of the accompanying library and limits of sensitivity. Also indicated (dashed line) is the abundance of the endogenous human BCR-ABL fusion gene from the accompanying K562 RNA sample. The K562 RNA sample is titrated at increasingly dilutions with GM12878 RNA sample that does not contain the endogenous human BCR-ABL fusion gene. (C) Scatter-plot illustrates the significance (P-value) associated with the identification of the fusion junction at increasing dilutions of the fusion gene RNA standard relative to the two normal gene isoforms RNA standards.

[0074] FIG. 10 illustrates an artificial chromosome simulating a microbe community. (A) In the generation of such an artificial chromosome, any one or more of a wide range of microbe genomes ranging in size, GC %, and taxa, are retrieved and shuffled to remove homology to natural sequences. (B) DNA standards can be generated that match representative subsequences within the artificial chromosomes. By combining these DNA standards at a range of concentrations, a heterogenous microbe community can be simulated.

[0075] FIG. 11 illustrates one example of a method for generating artificial 16S rRNA markers. The 16S rRNA sequence can be used as a marker for metagneomic phylogenetic analysis. A DNA standard matching the 16s rRNA sequence, including the flanking universal primer sequences, in the artificial microbe genome is produced. This DNA standard can act as a template for PCR amplification and sequencing during metagneomic analysis. (B) Scatterplot illustrates the abundance of simulated reads from sequencing 16S DNA standards corresponding to a wide range of different microbe genomes (indicated). (C) Scatter-plot illustrates the normalsiation of 16S DNA standard abundance according to the rRNA operon count in corresponding microbe genome.

[0076] FIG. 12 illustrates one example method for producing an artificial TCRγ loci. (A) The TCRγ loci comprises 14 Vγ segments and 5 Jγ segments. (B) Sequences are shuffled to remove homology to natural sequences. (C) Segments are joined together with a process modeled on the biological processes of VJ recombination and somatic hypermutation to generate numerous artificial TCRγ clonotypes. (D) DNA standards can be produced to represent individual artificial TCRβ clonotypes that maintain sequences complementary to universal primers. DNA standards can be used as a target DNA molecule for PCR amplification with universal primers simultaneous to PCR amplification of natural TCRγ loci in accompanying human DNA sample. Each DNA standard thereby amplifies a distinct amplicon whose abundance is proportional to primer binding efficiency and abundance of DNA standard.

[0077] FIG. 13 illustrates one example of artificial TCRβ loci. (A) The TCRβ loci comprise 65 VP segments, 2 Dβ segments and 13 Jβ. (B) Segments are joined together with a process modelled on the biological processes of V(D)J recombination and somatic hypermutation as measured in healthy adult samples to generate numerous artificial TCRβ clonotypes. (C) DNA standards can be produced to represent individual artificial TCRβ clonotypes. DNA standards can retain the sequences complementary to primers used in PCR amplification of the loci during immune repertoire sequencing. DNA standards can be conjoined to form single continuous template before PCR amplification with universal primers (D) Cumulative frequency distribution of clonotypes identified within healthy adult subjects and, for comparison, the relative abundance of DNA standards measuring artificial clonotypes. The artificial clonotypes provide a quantitative scale that extends across the dynamic range of the natural clonotypes, and can be used to ascribe abundance and determine limit of detection. (E) Cumulative frequency distribution of individual V, J and D segments that are found within a healthy adult subject (shown with black line), and (F) frequency distribution of individual V, J and D segments represented with DNA standards (shown with dashed line).

[0078] FIG. 14 illustrates an overview of a method by which RNA standards can be produced. The artificial chromosome sequence of interest is synthesized and inserted into an expression vector that is used for in vitro transcription to produce an RNA standard. The RNA standard is purified and quantified and diluted to appropriate concentration before being combined with other RNA standards to form a mixture. Different final mixtures can be added to different samples for analysis.

[0079] FIG. 15 illustrates an overview of a method by which DNA standards can be produced. The artificial chromosome sequence of interest is synthesized and inserted into a vector that is used as template for either (i) PCR amplification with flanking primers; or (ii) restriction endonuclease digestion at flanking sites. Excised DNA standard is purified and quantified and diluted to appropriate concentration before being combined with other DNA standards to form a mixture. Different final mixtures can be added to different samples for analysis.

[0080] FIG. 16 illustrates one example method for the generation of conjoined DNA standards. (A) Schematic diagram indicates the ligation of multiple individual DNA standards into larger conjoined DNA standards. (B) By combining individual DNA standards at different copy number enables us to emulate differential abundance between individual standards comprising a single conjoined DNA standard. (C) Because the fold change in abundance is dependent between individual standards, we can distinguish variation that results from pipetting from other sources of variation. In this case, plotting the slope of the measured versus known abundance of individual DNA standards within the conjoined standard indicates the magnitude of pipetting error. (D) Normalizing the individual DNA standard abundance according to this slope can normalize and minimize this error.

[0081] FIG. 17 illustrates one example method for producing of barcode variation. Contiguous or non-contiguous nucleotide sequences can be substituted into the sequence of RNA or DNA standards. Following sequencing, the barcodes can be used to distinguish between multiple identical DNA or RNA standards or derivative sequenced reads.

[0082] FIG. 18 illustrates a schematic overview of an example of the use of the artificial chromosomes and accompanying RNA/DNA standards during a next generation sequencing experiment. The RNA/DNA standards are added to the RNA/DNA sample of interest prior to library preparation and sequencing. The sequenced reads are simultaneously aligned to the reference genome of interest as well as the artificial chromosome. The alignment and assembly of sequenced reads to the artificial chromosome can be used to calibrate analysis of the accompanying reference genome.

[0083] FIG. 19 illustrates a schematic overview of the use of RNA standards within a RNA sequencing experiment. Indicated (dashed boxes) are analytical aspects that can be assessed using DNA standards.

[0084] FIG. 20 illustrates a schematic overview of the use of DNA standards within a genome sequencing experiment. Indicated (dashed boxes) are analytical aspects that can be assessed using DNA standards.

[0085] FIG. 21 illustrates a schematic overview of the use of DNA standards within a metagenomic sequencing experiment. Indicated (dashed boxes) are analytical aspects that can be assessed using DNA standards.

[0086] FIG. 22 illustrates one example of an RNA sequencing analysis using RNA standards and K562 total cell RNA. Scatterplot indicates the sensitivity of (A) intron and (B) exon discovery relative to abundance of RNA standard. This indicates limit of detection below which transcripts have insufficient coverage to enable robust assembly. (C) Scatterplot indicates the confidence associated with the observed quantitative measurement of the RNA standard relative to known abundance of the RNA standard.

[0087] FIG. 23 illustrates the alignment of reads from the RNA sequencing analysis using RNA standards and K562 total cell RNA. (A-E) Five examples of gene loci comprising multiple isoforms encoded on the artificial chromosome are illustrated. Reads produced from sequencing from RNA standards are aligned to the artificial chromosome. Continuous alignments are shown as black bars and regions where alignment is split are shown as thin lines. Overlapping reads alignments are then used to assemble the full-length gene loci structure, including introns and exons and alternative splicing events. Histogram indicates sequence coverage from cumulative read alignments.

[0088] FIG. 24 illustrates the quantitative analysis from the RNA sequencing analysis of RNA standard with human cell RNA samples. (A, B) Scatter-plots indicate the observed abundance (measured in RPKM) relative to the known abundance of RNA standards representing genes when combined as (A) Mixture A with K562 human cell RNA sample or (B) Mixture B with GM12878 human cell RNA sample. The linear correlation and slope indicates quantitative accuracy of each RNA sequencing library. (C) Scatter-plot illustrating the observed fold-change in gene RNA standard abundance relative to the expected fold-change in abundance between Mixtures A (added to K562 RNA) and Mixture B (added to GM12878 RNA). (D, E) Scatterplot indicates the observed abundance of individual isoforms represented by each RNA standard when combined as (D) Mixture A added to K562 RNA sample or (E) Mixture B added to GM12878 RNA sample. (F) Scatter-plot illustrating the observed fold-change in isoform RNA standard abundance relative to the expected fold-change in abundance between Mixtures A and Mixture B. Fold change between individual isoforms emulates alternative splicing.

[0089] FIG. 25 illustrates one example use of spliced RNA standards. (A) Scatter-plot indicates the observed relative abundance of variant and reference isoform for each gene represented by RNA standards. (B) Box-whisker plot (min-max) indicates the observed fold change between isoforms in Mixture A (added to K562 RNA sample) and Mixture B (added to GM128787 RNA sample) relative to the expected isoform fold-change. (C) In this example, a single gene loci on the artificial chromosome encodes two distinct isoforms (R_10_2_R and R_10_2_V) that share constitutive exons but differ for the 3′ alternative exons and termination site. We produced RNA standards representing each isoform at different conventions (3:1 ratio) for Mixture A and inverted (1:3 ratio) for Mixture B. (C) Plot indicates the observed (box-whisker plot showing min to max; n=3) relative to expected (dashed) expression of the R_10_2 gene and R_10_2_R and R_10_2_V isoforms in Mixture A and Mixture B.

[0090] FIG. 26 illustrates a quantitative comparison of RNA standards and ERCC RNA Spike-ins. (A) Scatter-plot indicates comparison of observed abundance (measured in RPKM) to known concentration of ERCC RNA Spike-Ins (black) relative to RNA standards (grey). Based on three replicates with error bars indicating standard deviation. Limit of detection indicates known concentration of RNA Standards below which sampling is infrequent and variable. (B) ERCC RNA Spike-Ins (black) relative to RNA standards (grey) exhibit similar linear profile and correlation above limit of detection. (C) Scatter-plot indicates the observed fold-change relative to expected fold-change for ERCC RNA Spike-Ins (black) and RNA Standard (grey) abundance between Mixture A (added to normal lung RNA sample) and Mixture B (added to matched lung adenocarcinoma RNA sample) (D) Cumulative frequency distribution of cancer genes expression (black line). The measured abundance of added RNA standards is indicated (dashed line) to provide an overlapping quantitative reference ladder against which to measure the concentration of endogenous cancer genes within the accompanying lung adenocarcinoma RNA sample.

[0091] FIG. 27 shows a scatter plot indicating the observed abundance (measured in RPKM) relative to known abundance of RNA standards representing (A) genes or (B) individual isoforms when added to mouse liver RNA sample. Linear correlation and slope indicate quantitative accuracy of RNA sequencing libraries.

[0092] FIG. 28 illustrates an example DNA sequencing analysis using DNA standards and GM21878 genome DNA. (A) Scatter-plot compares the measured abundance (in RPKM) of DNA standards relative to the known abundance of DNA standards. (B) Scatter-plot indicates the alignment fold-coverage of genetic variants represented by DNA standards relative to the known concentration of the DNA standards. (C) Scatter-plot indicates the observed variant allele frequency compared to the known variant allele frequency. Variant allele frequency is indicated relative to the reference allele frequency. The linear correlation and slope indicates that quantitative accuracy with which allele frequency is observed. (D) Scatter-plot compares the measured abundance (in RPKM) of DNA standards relative to the known abundance of DNA standards when used in analysis with moue genome DNA. (E) Cumulative frequency distribution plots illustrate the total distribution of (upper panel) PHRED quality scores, (middle panel) fold coverage or (bottom panel) relative variant allele frequency of DNA standards (dashed line) relative to the accompanying GM12878 genome DNA sample (black line).

[0093] FIG. 29 illustrates an example DNA sequencing analysis using DNA standards and comparing matched lung adenocarcinoma and normal genome DNA. (A) Frequency distribution mapping quality (MAPQ) scores from read alignment to the artificial chromosome. (B) Relative distribution of nucleotide mismatches (between sequence read and artificial chromosome) across length of 125 nt sequenced read from DNA standards. (C,D) Scatter-plots indicated the observed abundance relative to known abundance of DNA standards when combined as (C) Mixture A added to matched normal lung genome DNA sample or (D) Mixture B added to matched lung adenocarcinoma genome DNA sample. Linear correlation and slope indicate quantitative accuracy. (E) Scatter-plot indicates the sequencing coverage of genetic variants represented by DNA standards relative to the known concentration of DNA standard. A limit of detection (dashed line) indicates the lower bound concentration whereby genetic variation is not reliably detected.

[0094] FIG. 30 illustrates an example DNA sequencing analysis to identify genetic variation using DNA standards and comparing matched lung adenocarcinoma and normal genome DNA. (A) Cumulative frequency distribution plot indicates the distribution of quality scores assigned to variants (black line) correctly identified or (dashed line) erroneously identified. The indicated difference in the quality score for correctly and incorrectly identified variation can be used to distinguish correctly and incorrectly identified variation in the accompanying lung adenocarcinoma genome DNA sample. (B) Histogram indicates the enrichment of specific nucleotide substitutions (C to A and T to G) in incorrectly identify variants compared to correctly identified variants. (C,D) Scatter-plots indicates the observed relative variant allele frequency (relative to reference allele frequency) compared to the known relative variant allele frequency of DNA standards combined as (C) Mixture A with lung adenocarcinoma genome DNA sample and (D) Mixture B with matched normal lung tissue genome DNA sample. The linear correlation and slope indicates that quantitative accuracy with which allele frequency is measured. Accurate and sensitive measurement of allele frequency is required to detect mutations that may be harboured by only a small subset of tumour cells within total lung adenocarcinoma sample.

[0095] FIG. 31 illustrates an example DNA sequencing analysis using conjoined DNA standards. (A) Scatter-plot comparing the observed abundance of individual DNA standards compared to known abundance of DNA standards shown (upper panel) before normalisation for pipetting errors and (lower panel) following normalization by forcing conjoined DNA standards groups to exhibit a slope of 1. This enables the identification and removal of variation due to pipetting errors. (B) Multiple overlapping conjoined DNA standards are typically manufactured to provide at least three independent measurements at each known abundance point. Conjoined DNA standard group outliers (indicated) due to pipetting errors can be easily identified and removed. (C) Histogram (upper panel) indicates the 95% Confidence Interval determined for each known abundance point from three independent measurements. The 95% Confidence Interval is markedly smaller (lower panel) due to the higher quantitative accuracy following normalisation of DNA standard abundance to remove pipetting error.

[0096] FIG. 32 illustrates examples of DNA standards representing large-scale structural variation. DNA standards were produced that represented (A) Inversions, (B) Deletions, (C) Insertions, (D) Copy-Number Variation and (E) Mobile Element Insertions. DNA Standards were combined with GM12878 human cell genome DNA for library preparation and sequencing. Alignment coverage from each example DNA standards are shown (black histogram) along with examples of individual sequence read alignments (grey bars).

[0097] FIG. 33 illustrates one example of a method for producing an artificial D4Z4 Repeat. (A) A single D4Z4 Repeat copy (grey, arrow indicates relative direction) is retrieved from the human genome. The homology is removed (white box) and amplified to form head-to-tail repeat array. Multiple DNA standards matching repeat copy and flanking upstream and downstream half repeat copies, but distinguished by barcode variation, are produced. The relative abundance of DNA standards is proportional to the expected repeat copy number. (B) Scatter-plot illustrated the observed abundance of each DNA standard (in reads per million) relative to the expected copy-number. Also indicated are the D4Z4 repeat unit copy number determined by comparison to DNA standards for the lung normal, adenocarcinoma, K562 and GM12878 genome DNA samples.

[0098] FIG. 34 illustrates BioAnalyser (2100 High Sensitivity DNA Assay; Agilent) traces that confirm the size and purity of 15 amplicons produced by successful PCR amplification of artificial TCRγ clonotypes DNA standards using BIOMED2 universal primers (TCRγ Tube A and B) primers.

[0099] FIG. 35 illustrates an Analysis Of Metagenome DNA Standards. (A) Scatterplot illustrates the observed abundance (measured in RPKM) of assembled DNA standard contigs relative to the expected concentration of the DNA standards. (B) Three examples illustrate the impact of DNA standard abundance on contig assembly and coverage. Whilst DNA standards at high concentration (upper panel)exhibit high sequence read coverage and full contig assembly, by contrast, DNA standards at low abundance (bottom panel) exhibit low sequence read coverage and are poorly assembled. (C,D) Scatterplot illustrates the known concentration of DNA standards relative to the fractional coverage of the DNA standard with (C) sequenced reads alignments or (D) de novo assembled contigs.

[0100] FIG. 36 illustrates an example metagenome analysis of DNA standards used with fecal or soil microbe DNA. (A,B) Scatterplot illustrates the observed abundance (measured in RPKM) compared to the expected abundance of DNA standards used with (A) Fecal Sample Replicate 1 (B) and Fecal Sample Replicate 2. (C) Scatter-plot indicates the fraction of DNA standard that is correctly assembled de novo compared to the known abundance of the DNA standard. (D,E) Scatterplot illustrates the observed abundance (measured in RPKM) compared to the expected abundance of DNA standards used with soil samples from Watsons Creek (D) Replicate 1-3 (Mixture A) and (E) Replicate 4-6 (Mixture B). (F) Scatterplot indicating the observed fold-change compared to expected fold-changes in abundance of DNA Standards between Mixture A (Soil Sample Replicates 1-3) and Mixture B (Soil Sample Replicates 4-6). Linear correlation and slope indicate quantitative accuracy with which DNA abundance fold-change is measured between samples.

[0101] FIG. 37 illustrates one example method of producing DNA standards produced to measure GC bias. (A) Cumulative frequency distribution plot for GC content of sequenced reads from GC metagenome DNA standards (thin black line) and in accompanying Soil sample (Replicate 1; heavy black line). (B) Cumulative frequency distribution of experimentally-derived sequenced reads from selected DNA standards with extreme GC content (black line) compared to cumulative distribution of simulated reads (dashed line) from DNA standards. We observe an under-representation of experimentally-derived sequenced reads with extreme GC content relative to simulation. This indicates the quantitative impact of GC content on library preparation and sequencing procedures. (C) Cumulative frequency distribution of GC content of DNA standards added during sequencing of Soil Sample 1.

[0102] FIG. 38 illustrates a suitable computer system 3800 for calibrating a polynucleotide sequencing process. The computer system 3800 comprises a processor 3802 connected to a program memory 3804, a data memory 3806, a communication port 3808 and a user port 3810.

[0103] FIG. 39 illustrates one example method of producing conjoined synthetic standards to adjust for pipetting error in NGS methods. (A) Schematic illustrating possible construction of conjoined standards. (B) Illustrates a plot of the weighted normalized known concentration of each individual standard (derived from both the concentration of the hosting conjoined standard and the copy number within the conjoined standard) compared to the weighted-normalized measured abundance. (C) Illustrates the adjustment made after calibrating for known individual standard concentrations.

[0104] FIG. 40(A) Illustrates the generation of normal gene and fusion gene synthetic standards. (B) Illustrates a plot of synthetic fusion gene coverage at a location across the fusion junction relative to the known concentration of the synthetic fusion genes within an experimental mixture.

[0105] FIG. 41(A) is a cumulative distribution plot indicating the sensitivity with which single nucleotide variants in both the NA12878 genome (dashed line) and synthetic chromosome (grey line) are identified. (B) A cumulative distribution plot indicating the sensitivity with which small insertions or deletions (indels) in both the NA12878 genome (dashed line) and synthetic chromosome (grey line) are identified. (C) A screenshot from Integrated Genome Viewer (IGV) showing a heterozygous variant in read alignments to the synthetic chromosome.

[0106] FIG. 42(A) is a schematic plot indicating the range of variant allele frequencies present within the mixture. (B) A scatter-plot showing the expected variant allele fraction relative to the observed sequence coverage for both reference (black circle) and variant (grey circle outline). (C) A cumulative distribution of both true and false variant alleles identified according to the p-value threshold ascribed by VarScan2 (calculated by Fishers exact test of reference to variant allele coverage). (D) Illustrates the ratio of sensitivity and specificity with which variant alleles are detected relative to the p-value thresholds ascribed by VarScan2. (E) A schematic plot indicating the expected allele abundance of fetal and maternal variants across a range of fetal DNA loads. Also indicated (circle outline) is expected abundance for variants that represent trisomy events.

### DETAILED DESCRIPTION

### General

[0107] Throughout this specification, unless specifically stated otherwise or the context requires otherwise, reference to a single step, composition of matter, group of steps or group of compositions of matter shall be taken to encompass one and a plurality (i.e. one or more) of those steps, compositions of matter, groups of steps or group of compositions of matter.

[0108] As used herein, the singular forms of “a”, “and” and “the” include plural forms of these words, unless the context clearly dictates otherwise.

[0109] The term “and/or”, e.g., “X and/or Y” shall be understood to mean either “X and Y” or “X or Y” and shall be taken to provide explicit support for both meanings or for either meaning.

[0110] Throughout this specification the word “comprise”, or variations such as “comprises” or “comprising”, will be understood to imply the inclusion of a stated element, integer or step, or group of elements, integers or steps, but not the exclusion of any other element, integer or step, or group of elements, integers or steps.

[0111] The term “about” as used herein refers to a range of +/−10% of the specified value.

### Artificial Chromosome:

[0112] The artificial chromosome disclosed herein may be produced as a physical polynucleotide sequence or may be produced and stored in a computer (in silico). For many of the applications described herein, it is sufficient for the artificial chromosome to remain in silico. However, physical polynucleotide sequences of the artificial chromosome can be produced using standard, well-known methods of polynucleotide generation.

[0113] The artificial chromosome disclosed herein may comprise a DNA or RNA polynucleotide sequence. Thus, any reference herein to a polynucleotide sequence is to be understood as a reference to a DNA sequence or to an RNA sequence.

[0114] The precise length of the artificial chromosome can vary in accordance with the particular use for which the artificial chromosome is designed. For example, the length of the artificial chromosome can range from about 10³ to 10⁹ nucleotides long. In one example, the artificial chromosome comprises or consists of a polynucleotide sequence which is at least 1,800 nucleotides in length. In another example, the artificial chromosome comprises or consists of a polynucleotide sequence which is less than 20 megabases (Mb; wherein 1 Mb is equal to 1,000,000 nucleotides) long. Thus, the artificial chromosomemay, for example, be from 1,800 nucleotides long to 20 Mb long.

[0115] The artificial chromosome comprises an artificial polynucleotide sequence, wherein any fragment of the artificial polynucleotide sequence is distinguishable from any known naturally occurring genomic sequence. One advantage of the artificial polynucleotide sequence is that such a fragment can be added directly to samples containing a natural polynucleotide target of interest, whilst still being distinguishable from any natural polynucleotides present in the sample. It will be appreciated that the artificial chromosome may comprise additional sequences which share some homology (or sequence identity) with known, natural genomic sequences. Any such additional sequences are not comprised within the artificial polynucleotide sequence of the artificial chromosome.

[0116] The artificial polynucleotide sequence can form any proportion of the artificial chromosome. Thus, the artificial polynucleotide sequence can comprise from 1% to 100% of the artificial chromosome. For example, the artificial polynucleotide sequence can comprise about 10%, 20%, 30%, 40%, 50%, 60%, 70%, 80%, 90% or 95% of the artificial chromosome. In one example, the artificial polynucleotide sequence forms the majority of the artificial chromosome. Thus, the artificial polynucleotide sequence may form 50% or more, 60% or more, 70% or more, 80% or more, 90% or more, 95% or more, 99% or more of the artificial chromosome. In another particular example, the artificial polynucleotide sequence forms 100% of the artificial chromosome.

[0117] The length of the artificial polynucleotide sequence can vary. The length of the artificial polynucleotide sequence may be the entire length of the artificial chromosome. Accordingly, the length of the artificial polynucleotide sequence can range from about 10′ to 10 nucleotides long. In one example, the artificial polynucleotide sequence is at least 1,800 nucleotides in length. In another example, the artificial polynucleotide sequence is less than 20 Mb long. Thus, the artificial polynucleotide sequence may be, for example, from 1,800 nucleotides long to 20 Mb long. In another example, the length of the artificial polynucleotide sequence may be the same as the length of the fragment disclosed herein. For example, the length of the artificial polynucleotide sequence may be, for example, from 20 nucleotides to 10,000,000 nucleotides in length.

[0118] The artificial polynucleotide sequence of the artificial chromosome has little or no homology with any known, naturally occurring sequence (i.e., with any polynucleotide sequence isolated from any living organism). Accordingly, the chromosome disclosed herein is described as an “artificial” chromosome. The extent of homology may be determined by a comparison of the artificial chromosome's artificial polynucleotide sequence with any known, naturally occurring polynucleotide sequence, using any suitable sequence comparison method known in the art. Little or no shared sequence identity between the artificial chromosome's artificial polynucleotide sequence and any known, naturally occurring polynucleotide sequence indicates that the artificial polynucleotide sequence has little or no homology to any known, naturally occurring sequence.

[0119] The artificial polynucleotide sequence of the artificial chromosome may be entirely artificial and may not have any homology to any known, naturally occurring sequence. Thus, the artificial chromosome sequence may share no sequence identity with any known, naturally occurring nucleotide sequence.

[0120] In one example, any 10,000,000 contiguous nucleotides of the artificial polynucleotide sequence have less than 100% sequence identity with any known naturally occurring genomic sequence of the same length. In another example, any 1,000,000 contiguous nucleotides of the artificial polynucleotide sequence have less than 100% sequence identity with any known naturally occurring genomic sequence of the same length. In other examples, any 500,000, any 100,000, any 50,000, any 10,000, any 1,000, any 500, any 400, any 300, any 250, any 200, any 150, any 100, or any 50 contiguous nucleotides of the artificial polynucleotide sequence have less than 100% sequence identity with any known naturally occurring genomic sequence of the same length. In a particular example, any 250 contiguous nucleotides of the artificial polynucleotide sequence have less than 100% sequence identity with any known naturally occurring genomic sequence of the same length. In another particular example, any 150 contiguous nucleotides of the artificial polynucleotide sequence have less than 100% sequence identity with any known naturally occurring genomic sequence of the same length. In a particular example, any 100 contiguous nucleotides of the artificial polynucleotide sequence have less than 100% sequence identity with any known naturally occurring genomic sequence of the same length. In any of the artificial polynucleotide sequences disclosed herein, any 10,000,000, any 1,000,000, any 500,000, any 100,000, any 50,000, any 10,000, any 1,000, any 500, any 400, any 300, any 250, any 200, any 150, any 100, any 50, any 25, any 21 or any 20 contiguous nucleotides of the artificial polynucleotide sequence may have less than 100%, less than 95%, less than 90%, less than 80%, less than 70%, less than 60%, less than 50%, less than 40%, less than 30%, less than 20%, less than 10%, less than 5%, or less than 1% sequence identity with any known naturally occurring genomic sequence of the same length, in any combination or permutation. Thus, for example, any 21 contiguous nucleotides of the artificial polynucleotide sequence may have less than 50%, less than 40%, less than 30%, less than 20%, less than 10%, less than 5%, or less than 1% sequence identity with any known naturally occurring genomic sequence of the same length. In one particular example, any 21 contiguous nucleotides of the artificial polynucleotide sequence has less than 50% sequence identity with any known naturally occurring genomic sequence of the same length.

[0121] Small portions (e.g., 8, 9, 10, 11, 12, 13, 14 or 15 contiguous nucleotides) of the artificial chromosome may be homologous with any known, naturally occurring nucleotide sequences of the same length. For example, such small portions of the artificial chromosome may replicate a small portion of a known, naturally occurring nucleotide sequence which comprises a sequence variant of interest. For example, a small portion (e.g., 8, 9, 10, 11, 12, 13, 14 or 15 contiguous nucleotides) of the artificial chromosome may be 100% identical over its length to a known, naturally occurring nucleotide sequence which comprises a sequence variant of interest, such as a mutation in a particular gene. Whilst the majority of the artificial chromosome sequence may share little or no homology with any known, naturally occurring nucleotide sequence (and therefore, may be an artificial polynucleotide sequence), the artificial chromosome may additionally contain one or more such small portions or particular sequences of interest.

[0122] When the artificial chromosome comprises or consists of a polynucleotide sequence which shares some sequence identity with a known, naturally occurring nucleotide sequence, the artificial chromosome may not encode a functional mRNA, rRNA, tRNA, lncRNA, snRNA, snoRNA or functional polypeptide or protein.

[0123] The artificial polynucleotide sequence of the artificial chromosome disclosed herein can contain one or more general features of naturally occurring polynucleotide sequences (e.g., of naturally occurring chromosomes), despite having no shared primary nucleotide sequence identity with any known, naturally occurring polynucleotide sequence. Thus, the fragment of the artificial chromosome disclosed herein can contain one or more general features of naturally occurring polynucleotide sequences. For example, the artificial polynucleotide sequence can encode genetic features typically observed in eukaryotic and/or prokaryotic chromosomes or genomes including (but not limited to) genes, repeat elements, mobile elements, small-scale genetic variation, large-scale genetic variation, etc. FIG. 1 provides an illustration of such exemplary features, any one or more of which may be included in the artificial polynucleotide sequence disclosed herein, in any combination.

### Generating an Artificial Chromosome:

[0124] The present disclosure also provides a method of making (or “constructing”) the artificial chromosome or fragment thereof disclosed herein. In addition, the present disclosure provides an artificial chromosome or fragment thereof made (or “constructed”) by any one or more of the methods disclosed herein. The artificial chromosome disclosed herein may be constructed by a number of suitable methods, as described herein. For example, the artificial chromosome may be constructed by generating a contiguous polynucleotide sequence in silico having little or no sequence identity to other known, naturally occurring sequences, by the random addition of nucleotides to form an extended contiguous polynucleotide sequence. Suitable software programs which can be used to generate an artificial chromosome sequence include (for example and without limitation): software to produce random DNA sequences such as FaBox (Villesen 2007) or RANDNA(Piva and Principato 2006); software to shuffle DNA sequences such as uShuffle (Jiang, Anderson et al. 2008) and Shufflet (Coward 1999).

[0125] Alternatively, the artificial chromosome may be constructed by retrieving a known or natural nucleotide sequence identified from a natural source (which may be referred to herein as a “template” sequence) and then shuffling (or “rearranging”) the nucleotides to remove or reduce the shared sequence identity of the template sequence with any known, naturally occurring polynucleotide sequence. In one example, all nucleotides of the artificial chromosome can be shuffled together to change nucleotide order. In one example, contiguous nucleotides within the template nucleotide sequence can be partitioned into windows of discrete nucleotide lengths along the template sequence and only those nucleotides within a single window can be shuffled together. This allows the primary nucleotide sequence within the window to be rearranged so that the shuffled (or “rearranged”) sequence shares little or no sequence identity with any known, naturally occurring sequence, whilst retaining broader characteristics of nucleotide composition that are typical of the original known or natural sequence. For example, any nucleotide biasing within a window (such as high guanine or cytosine content) can be retained across the length of the shuffled window by ensuring that the same nucleotides present in the window applied to the template sequence are retained in the shuffled sequence within the same window (as exemplified by the illustration in FIG. 2). Thus, the “shuffling” referred to herein reorders the same nucleotides within a fixed length of polynucleotide sequence, and does not involve an alteration of the numbers of each particular nucleotide present within that fixed length of polynucleotide sequence.

[0126] Retaining high level nucleotide composition characteristics of a template sequence can be advantageous because sequence-specific features can bias the representation of natural genetic features in next-generation sequencing and analysis. For example, sequences with high or low guanine or cytosine content (GC %) may be poorly amplified by PCR during library preparation, resulting in poor representation within sequencing libraries. Alternatively, it can be difficult to unambiguously align sequences with a repetitive sequence structure, resulting in poor representation during analysis. Since the artificial chromosome and standards disclosed herein can be designed to emulate natural genetic features, the synthetic primary sequence of the artificial chromosome or standards can be made to reflect the same sequence-specific bias as the template sequence. Thus, the artificial chromosome or standards disclosed herein can have an artificial primary sequence, whilst maintaining the nucleotide composition and/or repeat structure as the original template sequence.

[0127] The window size selected to perform any shuffling can correspond to a fixed polynucleotide length (e.g., 10, 15, 20, 30, 40, 50, 60, 70, 80, 90, 100, 150, 200, 250, 300, 400, 500, 600, 700, 800, 900, 1000 or more nucleotides). Alternatively, the window size selected can correspond to the boundaries of a higher-level genetic feature (e.g., introns, exons, CpG islands, and others) present in the template sequence. For example, the primary intron and exon sequences of a gene can be shuffled whilst still maintaining the organisation of exon and intron features. Thus, the structure and organisation of higher-level genetic features can be retained, despite the primary sequence of the artificial polynucleotide sequence within the artificial chromosome not matching known or natural sequences.

[0128] Alternatively, the artificial chromosome may be constructed by retrieving a known or natural nucleotide sequence identified from a natural source (a “template” sequence) and then reversing the template sequence. Naturally occurring nucleotide sequences (DNA or RNA sequences) have an intrinsic 5′ to 3′ directionality imposed by the phosphodiester bonds between the nucleotide bases. Reversing the sequence to the 3′ to 5′ direction violates this directionality and generates a sequence that no longer has homology (or sequence identity) to the original template sequence. One advantage of this method of making the artificial chromosome is that the nucleotide composition and repetitiveness of the original sequence is retained, even though sequence identity to the template sequence is removed. The reversed sequence is therefore “artificial” and can be distinguished from the original endogenous sequence (that has the correct directionality).

[0129] Alternatively, the artificial chromosome may be constructed by retrieving a known or natural nucleotide sequence identified from a natural source (a “template” sequence) and then substituting nucleotides for alternative nucleotides within the sequence. For example, guanine nucleotides can be substituted for cytosine nucleotides, cytosine nucleotides can be substituted for guanine nucleotides, adenine nucleotides can be substituted for thymine nucleotides, and/or thymine nucleotides can be substituted for adenine nucleotides. By substituting nucleotides in a systematic manner, the repeat structure of the sequence can be maintained, the pyrimidine and purine composition can be maintained, and/or the GC content can be maintained, even though the individual nucleotides and the primary sequence may change.

[0130] It will be appreciated that the shuffling, substituting and reversing techniques can each be applied in any combination or permutation during construction of an artificial chromosome and/or fragment thereof. Thus, for example, a template sequence can be reversed and selected windows of the reversed sequence can then be shuffled in order to reduce or remove any residual homology in the reversed sequence to known natural sequences. Alternatively, a template sequence can be shuffled and selected windows of the shuffled sequence can be reversed in order to reduce or remove any residual homology in the shuffled sequence to known natural sequences.

[0131] To confirm whether homology to known natural sequences exists within the artificial chromosome nucleotide sequence, known nucleotide sequence databases (such as the NCBI Nucleotide collection (nr/nt) database) can be queried with software programs such as the BLASTn software program (Altschul, S. F., et al., 1990). Other suitable software programs facilitating the alignment and comparison of multiple nucleotide sequences can also be used, for example FASTA (Pearson and Lipman 1988) or ENASequence Search (www.ebi.ac.uk/ena/search/). For complex sequences, homology typically corresponds to 21 or more contiguous nucleotide sequences matching a known sequence (e.g., having 100% sequence identity over the 21 or more nucleotide sequence length). For simple sequences (such as repetitive or mono-nucleotide compositions), homology corresponds to an expected (E) value less than or equal to 0.01 (as defined in NCB1 BLAST (Altschul, S. F., et al., 1990)). Thus, any 21 or more contiguous nucleotides of the artificial polynucleotide sequence disclosed herein may have an E value less than or equal to 0.01 (as defined in NCB1 BLAST (Altschul, S. F., et al., 1990)).

[0132] If the shuffling, substituting and/or reversing techniques do not remove or sufficiently reduce the shared sequence identity with other, known, naturally occurring sequences to the extent desired, individual nucleotide substitutions can be made to achieve the desired level of reduced sequence similarity. Thus, the shuffled, substituted or reversed sequence can be further edited (or “curated”) by the specific insertion, deletion or substitution of nucleotides to remove any remaining shared sequence identity. Accordingly, the methods of generating the artificial chromosome disclosed herein may further comprise editing shuffled, substituted or reversed nucleotide sequences to reduce or remove any shared sequence identity with any known, naturally occurring sequence.

[0133] Any natural genome or chromosome sequence can be shuffled, substituted or reversed to remove homology, whilst retaining characteristic features of the nucleotide composition of the natural genome or chromosome sequence. Suitable natural nucleotide sequences can be identified from any one or more publically available nucleotide online databases. Examples of suitable nucleotide online databases include nucleotide database available under the name of GENBANK™ and Nucleotide collection (nr/nt) database (National Center for Biotechnology Information), DNA Data Bank of Japan (National Institute of Genetics) and EMBL-BANK (European Bioinformatics Institute). Alternatively, suitable natural nucleotide sequences may be obtained by isolating polynucleotides from a natural source and sequencing those polynucleotides using known sequencing techniques. In one example, the natural genome or chromosome sequence is a mammalian genome or chromosome sequence, such as a human or murine genome or chromosome sequence. For example, the natural nucleotide sequence may be selected from a reference human genome sequence (e.g., the latest annotated version hg19). Alternatively, the natural nucleotide sequence may be selected from any mammalian sequence (e.g., M. musculus mm10), any vertebrate genome (e.g., D. rerio danRer7), any animal sequence (e.g., C. elegans ce10, D. melanogastor dm3, and others), any plant sequence (e.g., A. thalianis tair9), any fungi sequence (e.g., N. crassa) or any eukaryote sequence (e.g., S. cerevisae SacCer6), or any bacterial sequence (e.g., E. coli eschColiK12), or any archaea sequence (e.g., M. kandleri methKand1), or any viruses, phages and organelle sequence (eg. Hepatitis delta virus).

[0134] The artificial polynucleotide sequence within the artificial chromosome disclosed herein may be distinguishable from any known naturally occurring genomic sequence derived from a single species, or from any known naturally occurring genomic sequence derived from multiple species. For example, the artificial polynucleotide sequence within the artificial chromosome disclosed herein may be distinguishable from any known naturally occurring human genomic sequence. In another example, the artificial polynucleotide sequence within the artificial chromosome disclosed herein may be distinguishable from all known naturally occurring genomic sequences of any organism.

[0135] In another illustrative example, the Anaeromyxobacter dehalogens genome, which has a high GC content (75%), can be used as a template sequence. Shuffling the A. dehalogens genome sequence can produce an artificial chromosome comprising a polynucleotide sequence with no homology (or no shared sequence identity) to the original A. dehalogens genome (or any other natural or known sequence), yet which retains the high GC content that is a feature of the A. dehalogens genome.

[0136] The processes described herein can be used to generate multiple contiguous nucleotide sequences without homology (or shared sequence identity) to any known or natural sequence. These multiple sequences can be rearranged and combined to form a single merged contiguous sequence. Thus, the artificial chromosome disclosed herein can be constructed in a modular fashion, which provides a great deal of flexibility in its design and construction. For example, multiple sequences, possibly encoding different genetic features, can be constructed independently before being collectively assembled into a single complex artificial chromosome. Assembling different sequence combinations also affords the construction of custom-built artificial chromosomes for specific research or diagnostic requirements.

[0137] In addition, multiple (i.e., two or more) artificial chromosomes can be generated and used together. Accordingly, the present disclosure also provides a library of two or more artificial chromosomes. The number of chromosomes chosen to populate the library can be chosen depending on the particular intended application of the library. In one example, the library of artificial chromosomes can emulate the organization of entire genomes, including polyploid genomes. For example, a library of artificial chromosomes can be created containing 46 artificial chromosomes, to emulate the organization of the human genome across 46 distinct chromosome sequences. Thus, individual artificial chromosome sequences can be duplicated to form a polyploid artificial genome. Sequence variation can be incorporated between duplicate artificial chromosomes, thereby simulating natural zygosity. In another example, a library of artificial chromosomes may emulate multiple microbe genomes being present as a collection or community of microbes (such as may be present in an environmental sample which is subjected to sequencing analysis). For example, such a collection may comprise more than 10, such as about 30 different artificial chromosomes.

### Additional Artificial Chromosome Features:

[0138] As stated above, an artificial chromosome (or a fragment thereof) can incorporate higher level features such as eukaryote gene loci, CpG islands, mobile elements, repetitive polynucleotide features, small scale genetic variation and large scale genetic variation or prokaryote gene loci, DNA repeats, and/or mobile elements, despite containing a primary nucleotide sequence that is not present in one or more (or any) natural organisms and which does not encode full-length or functional mRNA, rRNA, tRNA, microRNA, piRNA, lncRNA, snRNA, snoRNA, a functional translated reading frame, a polypeptide or a protein. These and other additional or alternative features of the artificial chromosome are described herein.

### Artificial Genes

[0139] The artificial polynucleotide sequence of the artificial chromosome can comprise one or more artificial genes. The one or more artificial genes can comprise one or more exons with intervening introns. The introns and/or exons can be of any suitable length. For example, the exons may be from 25 nucleotides to 10 kilobases (kb) in length. The introns may be from 50 nucleotides to 2 megabases (Mb) in length. The total gene size may range from 200 nucleotides to 4 Mb. The number of artificial genes present on the artificial chromosome may vary from 1 to 10,000. The number of isoforms produced of each artificial gene may vary from 1 to 200. The number of exons per artificial gene may vary from 1 to 300. The number of introns per artificial gene may vary from 1 to 300.

[0140] The artificial genes can be created by any suitable method described herein. For example, the artificial genes can be created using the shuffling techniques described herein, using shuffling windows corresponding to the naturally occurring intron and exon sequences of the naturally occurring template nucleotide sequence. Once shuffled (and further manually edited, if required), the artificial gene can then be reconstructed in the artificial chromosome with the intron and exon structure of the original naturally occurring gene, (as exemplified by the illustration of an artificial chromosome in FIG. 3). In addition, small sequence elements less than 15 nucleotides, such as splicing and transcription start site and stop sequence elements can be populated around the artificial gene loci encoded within the artificial chromosome.

### Artificial Mobile Elements

[0141] The artificial polynucleotide sequence of the artificial chromosome can comprise one or more mobile repeat elements. Mobile repeat elements are highly similar DNA sequences that are present as multiple copies interspersed throughout the artificial chromosome. Their length and abundance can be varied as required. For example, the repeat unit of the artificial mobile elements which can be incorporated into the artificial chromosome of the present disclosure can be 5, 6, 7, 8, 9, 10, 15, 20, 30, 40, 50, 60, 70, 80, 90, 100, 150, 200, 250, 300, 350, 400, 450, 500, 600, 700, 800, 900, 1000 or more nucleotides in length. For example, the size of the repeat unit of the artificial mobile elements can vary from 100 nucleotides to 10 kb. The number of repeat elements present in an artificial chromosome disclosed herein may constitute from 0.1-90% of the total artificial chromosome length.

[0142] In one example, the length and abundance of the mobile elements is tailored so as to emulate natural mobile insertion elements. Again, the primary sequence of the mobile element is generated so as to share little or no sequence identity with any known, naturally occurring mobile element. An example of a suitable mobile element that may be included in the artificial chromosome of the present disclosure is a mobile element emulating the human SINE element. Such a mobile element is about 350 nucleotides in length. In one example, multiple mobile elements emulating the human SINE element can be incorporated into the artificial chromosome so that they comprise about 10% (e.g., 10.7%) of the artificial chromosome sequence.

[0143] Artificial mobile elements can be generated so as to emulate the hierarchy of mobile repeat elements that results from the accumulation of mutations from ancient to recent insertion events (Lander, E. S. et al., 2001). For example, initially, the original, natural (“ancestral”) repeat sequence of the mobile element can be shuffled to remove homology to known natural sequences. The shuffled mobile element sequence can then be duplicated to produce multiple copies. For example, the artificial chromosome may contain at least 2, at least 3, at least 4, at least 5, at least 10, at least 20, at least 30, at least 40, at least 50, at least 60, at least 70, at least 80, at least 90, at least 100, at least 500, at least 1,000 or at least 2,000 or more copies of an artificial mobile element. One or more of the copies (or each copy) can then be subjected to random nucleotide substitutions, insertions and deletions to replicate sequence degeneration of mobile repeat sequences from the ancestral sequence (as exemplified by the illustration in FIG. 4). The mobile elements can also undergo multiple further cycles of nucleotide substitution and amplification to create a range of mobile elements.

### Repeat Polynucleotide Sequences

[0144] The artificial polynucleotide sequence of the artificial chromosome can comprise repetitive polynucleotide features, such as repetitive DNA features including, for example, terminal repeats, for example telomeres, inverted repeats, and tandem repeats, for example centromeres. Tandem, inverted and terminal repeat DNA can evolve through a series of repeat unit amplification events resulting in the spreading of new repeat subfamilies. This process of generating repeat DNA sequence can be emulated when designing artificial repeat DNA by using consecutive rounds of repeat-unit amplification followed by artificially replicated sequence divergence (e.g., by manipulation of the repeat units to insert random nucleotide substitutions, deletions and/or insertions; as exemplified by the illustration in FIG. 5). This iterative process can generate repeat DNA tandem arrays that maintain a hierarchal relationship between subsets of repeat units.

[0145] Thus, the artificial polynucleotide sequence of the artificial chromosome can comprise artificial repeat DNA that emulates repetitive human genetic features, such as satellite DNA. In another example, the artificial chromosome can contain one or more centromeres. The centromeres can constitute large arrays of tandem repeat units with DNA sequences between 25-5,000 nucleotides long. Alternatively or in addition, the artificial chromosome can contain repetitive telomere sequences. The repetitive telomere sequences can be of any suitable length. For example, the repetitive telomere sequences can comprise repeat units of 5, 6, 7, 8, 9, 10, 11, 12, 13, 14, 15, 20 or more nucleotides. For example, the repetitive telomere sequence can be from 4-10 nucleotides in length. In one example, such telomere sequences can comprise a 6 nucleotide motif tandemly repeated up to 10 kb at the sequence termini. Other suitable repeats can be designed as required. Any suitable number of repeats can be incorporated into the artificial chromosome disclosed herein. In one example, the copy number of the telomere repeats may be from 5,000-50,000.

### Small-Scale Genetic Variation

[0146] Small-scale genetic variation (including, for example, single-nucleotide polymorphisms, insertions, deletions, duplications, and multiple nucleotide polymorphisms that are all less than 50 contiguous nucleotides in length) can be incorporated into multiple artificial chromosomes disclosed herein. For example, nucleotide differences between a pair of artificial chromosomes can be generated in order to simulate genetic variation, wherein the two or more variants present on two or more artificial chromosomes represent two or more alleles (as exemplified by the illustration in FIG. 6). Accordingly, multiple artificial chromosomes can represent multiple alleles. For example, two matching copies of an artificial chromosome emulating a portion of a diploid genome can be produced so as to contain two copies of one allele, (thereby simulating homozygosity). Alternatively, each of the two copies of an artificial chromosome can contain a different allele (thereby simulating heterozygosity). It will be appreciated that multiple alleles can be prepared on multiple artificial chromosomes, as desired. Accordingly, the present disclosure provides collections (or “libraries”) of multiple artificial chromosomes, representing naturally occurring allelic variation. In one example, 2, 3 or 4 artificial alleles on 2,3 or 4 artificial chromosomes are provided.

[0147] During the generation of small-scale genetic variation for incorporation in the artificial chromosomes disclosed herein, the small-scale variation nucleotide sequence and flanking artificial sequences may be required to be edited to remove any homology to known natural sequences.

[0148] Polynucleotide sequences representing genetic variation that is associated with disease can also be incorporated in the artificial chromosome disclosed herein. For example, specific diagnostic genetic features, such as a particular SNP, can be inserted into the artificial chromosome to provide matching local sequence context for the mutation, whilst maintaining little or no homology to known natural sequences at a broader level.

[0149] Since the emulation of known genetic variation requires multiple artificial chromosomes, it is possible to generate a particular artificial chromosome to be regarded as a “consensus”, or “reference” sequence (similar to consensus genome assemblies such as hg19 human genome assembly, mm10 mouse genome assembly etc.) and one or more multiple, distinct artificial chromosomes (or “variant” artificial chromosomes) that differ from the reference chromosome at one or more sites of genetic variation. Accordingly, the library of artificial chromosomes disclosed herein can comprise a single reference artificial chromosome and one or more variant artificial chromosomes that differ from the reference chromosome at one or more sites of genetic variation.

### Large-Scale Genetic Variation

[0150] Large-scale genetic variation (including, for example, large deletions, duplications, copy-number variants, insertions, inversions and translocations, each concerning nucleotide sequences of 50 or more contiguous nucleotides) can also be incorporated into multiple artificial chromosomes disclosed herein. Naturally occurring large-scale genetic variation often affects nucleotide sequences that are larger than the typical shotgun short sequence read length, further complicating the detection and resolution of structural variation in naturally occurring, sample nucleotide sequences.

[0151] Shuffling of nucleotide sequences affected by transversions, copy number variation and/or mobile-element insertions can be performed with a window size that matches the structural unit size of the large-scale variation, as described herein. For example, a single repeat unit can be shuffled before duplication, so that resulting duplicated copies share the same shuffled sequence. In another example, the sequence can be shuffled before transversion, so that only the orientation and breakpoints differ to the template sequence. In another example, the sequence can be shuffled before insertion of mobile elements, so that the insertion retains sequence homology to other mobile elements in the same artificial chromosome.

[0152] One example of large-scale genetic variation which can be incorporated into multiple artificial chromosomes disclosed herein is a translocation. Translocations can occur by which a sequence is rearranged between two artificial chromosomes, generating two reciprocal fusion artificial chromosomes, (as exemplified by the illustration in FIG. 9). Translocations between two non-homologous artificial chromosomes can result in the fusion of two different genes to produce a chimeric gene fusion. Thus, the artificial chromosome disclosed herein can comprise one or more artificial chimeric gene fusions.

### Artificial Microbe Genomes

[0153] The artificial polynucleotide sequence of the artificial chromosome disclosed herein can be designed to simulate a microbe genome (which artificial chromosomes are also referred to herein as “artificial microbe genomes”). For example, artificial chromosomes can be generated by shuffling natural microbe genomes to remove primary sequence homology to natural sequences by the methods disclosed herein (as exemplified by the illustration in FIG. 10), whilst still retaining particular features of the original microbe genome, (such as, but not limited to, size, rRNA operon number, GC %, repeat content, etc.).

[0154] Multiple artificial chromosomes can be generated to simulate an artificial microbe community for metagenome analysis. Thus, the present disclosure also provides a library of two or more artificial microbe genomes, in which any shared sequence identity with the original, naturally occurring microbe genome sequence has been reduced or removed. The relative abundance of individual artificial microbe genomes can be selected so as to correspond to the different abundances of microbe populations within a metagenome sample. Accordingly, the library of artificial microbe genomes can be generated so as to emulate a heterogeneous microbe community typically profiled during metagenome analysis. Any suitable number of artificial microbe genomes disclosed herein can be combined into a library. In one example, the library may contain 3-3,000 artificial microbe genomes.

[0155] The artificial microbe genomes disclosed herein can encode one or more gene loci. Gene loci may comprise artificial 16S rRNA genes that are commonly used in phylogenetic profiling of metagenome communities (see, e.g., Edwards, R. A. et al., 2006). PCR amplification and sequencing of the variable regions within the 16S rRNA gene has been the primary approach to assess abundance and taxonomic diversity of microbes within a sample. Whilst the artificial 16S rRNA sequence present in the artificial microbe genomes disclosed herein is typically shuffled to remove homology to known natural sequences, the sequence complementary to universal primers used in amplicon sequencing can be tailored to remain identical to natural sequences, (as exemplified by the illustration in FIG. 11).

### Artificial Immune Receptor Clonotypes

[0156] The artificial polynucleotide sequence of the artificial chromosome disclosed herein can encode one or more immune cell receptor gene loci, including representations of any one or more of the IgA, IgH, IgL, IgK, IgM, TCRA TCRB, and TCRG receptors, or others. These immunoglobulins and T-cell receptor loci undergo V(D)J recombination and somatic hypermutation to generate a diverse range of sequences called clonotypes. These biological processes can be modelled using artificial chromosome sequences to generate a suite of artificial clonotypes.

[0157] Variable (V) segment, Joining (J) segment and Diversity (D) segment sequences (and flanking introns) from immunoglobulin and T-cell receptor sequences can be retrieved from a genome sequence such as the human genome and shuffled separately to reduce or remove homology. In some examples, it may be desired to retain a small (for example, 20 nucleotide long) sequence complementary to universal primer sequences commonly used for amplicon profiling of immune receptors (see, e.g., van Dongen, J. J. et al., 2003). V(D)J recombination of the artificial immunoglobulin and T-cell receptor loci can then be performed by randomly selecting a Joining (J) segment that is first combined with a randomly selected Diversity (D) segment to form a D-J gene segment, with intervening sequence removed, followed by the joining of a randomly selected Variable (V) segment, resulting in a rearranged artificial VDJ gene segment, (as exemplified by the illustration in FIGS. 12 and 13). The random selection of different segments generates a huge repertoire of different segment combination. Additional diversity can be added by the substitution, addition or deletion of nucleotides at segment junctions or within segments. Each rearranged, artificial VDJ gene segment is referred to herein as a “clonotype”. A large number of artificial clonotypes can be produced by this method, emulating the size, diversity, complexity and profile of natural immune receptor clonotypes typically observed during the immune-repertoire sequencing of a human white blood cells.

### Computer Readable Medium:

[0158] The artificial chromosomes disclosed herein may be provided in silico and may therefore be provided on a computer readable medium. Thus, the present disclosure also provides a computer readable medium containing data representing one or more artificial chromosomes disclosed herein. The computer readable medium may be non-transitory.

[0159] The computer readable medium may be provided together with a computer system adapted to analyse the artificial chromosome or chromosomes stored on the computer readable medium.

[0160] The present disclosure also provides software allowing the analysis of the artificial chromosome or chromosomes stored on the computer readable medium. For example, the software may allow sequence comparisons to be performed, comparing the sequence of a given input sequence to the artificial chromosome sequence. Any known software package capable of achieving this function can be used.

### Polynucleotide Standards:

[0161] Any part or whole of the artificial chromosome sequences disclosed herein can be physically created as an RNA or DNA polynucleotide. Thus, the present disclosure also provides a fragment of the artificial chromosome disclosed herein, wherein the fragment comprises or consists of from 20 to 10,000,000 contiguous nucleotides of the artificial polynucleotide sequence of the artificial chromosome. For example, the fragment may comprise or consist of any 10,000,000, any 1,000,000, any 500,000, any 100,000, any 50,000, any 10,000, any 1,000, any 500, any 400, any 300, any 250, any 200, any 150, any 100, any 50, any 25, any 21 or any 20 contiguous nucleotides of the artificial polynucleotide sequence. Such a fragment is referred to herein as a “standard”. The polynucleotide standard matches the corresponding artificial sequence of the artificial chromosome. Accordingly, the polynucleotide standard is capable of representing any one or more features of the artificial chromosome disclosed herein. It will be appreciated that the standards disclosed herein can be used independently of the artificial chromosome. For example, artificial standards can be used to calibrate polynucleotide quantitation processes without requiring reference to the artificial chromosome.

[0162] The generation of physical, tangible standards based on the artificial chromosome disclosed herein allows the calibration of a wide variety of sequencing methods (including PCR amplification and NGS sequencing methods). For example, this may be performed by adding a known quantity of one or more polynucleotide standards to a given RNA or DNA sample before the amplification and/or sequencing method is performed. Analysis of the sequencing of the known polynucleotide standard with reference to the artificial chromosome provides a powerful calibration of the particular amplification and/or sequencing method used.

### Production of RNA Standards

[0163] The standard may be an RNA standard. An RNA standard is an RNA molecule that matches and represents a feature of interest encoded by the artificial chromosome. For example, the RNA standard can represent an artificial gene or transcribed element or fragment thereof that is encoded by the artificial chromosome. In one example, the RNA standard does not include any homology to any known, natural sequence. The length of the RNA standard can therefore vary depending on the feature of interest. In one example, the RNA standard can vary in length from 200 nucleotides to 30 kb.

[0164] The sequence of interest from the artificial chromosome can be synthesized into a DNA sequence. The DNA sequence can be inserted in operable linkage with an active promoter into a vector. Thus, the present disclosure also provides a DNA molecule encoding a fragment of the artificial chromosome. The present disclosure also provides a polynucleotide vector (such as a DNA vector) comprising a DNA sequence encoding a fragment of the artificial chromosome. Any suitable vector can be used. In one example, the vector is an expression vector. The expression vector can contain any suitable promoter and/or enhancer capable of directing transcription of the standard disclosed herein.

[0165] The vector disclosed herein can be used as a template for an RNA synthesis reaction that produces an RNA molecule. Thus, the present disclosure also provides a method for producing a polynucleotide standard disclosed herein, comprising synthesising an RNA molecule from a vector disclosed herein. Suitable RNA synthesis methods are well known. For example, such synthesis methods may be performed in a cell free, in vitro expression system. Alternatively, such methods may be performed in an in vivo expression system, such as a host cell. Any suitable host cell can be used. The produced RNA molecule can then be purified by known methods in order to produce the final RNA polynucleotide standard.

[0166] Thus, the present disclosure provides methods that can be used to produce an RNA standard that matches part or whole of the artificial sequence of the artificial chromosome sequence. An overview of a suitable method for the production of RNA standards is illustrated in FIG. 14.

### Mixtures of Multiple RNA Standards

[0167] Multiple RNA standards can be used collectively as a mixture. Accordingly, the present disclosure provides a mixture of one or more RNA standards disclosed herein. The mixture can comprise any suitable buffer to maintain the structural integrity of the RNA standards.

[0168] Individual RNA standards can be diluted at a range of different concentrations and then combined into a mixture of RNA standards. This mixture of RNA standards across a range of different concentrations can therefore comprise a quantitative scale. The quantitative scale can comprise a ladder of RNA standards at different sequential abundance. This scale can be used as a reference to measure the abundance of natural RNA transcripts within the accompanying sample. Alternative mixtures can be produced that differ in the relative concentration of individual RNA standards. Comparison of RNA standards in alternative mixtures can thereby measure differential abundance of the RNA standards, thereby providing a reference scale that can be used to measure changes in RNA abundance, such as occurs during gene expression, between two or more samples.

[0169] The number of RNA standards provided per mixture can vary from 3-3000, such as from 3-300 per mixture prepared. For example, a mixture may be provided containing about 90 RNA standards. The RNA standards may be added to a sample of interest so as to constitute from 0.001-50%, such as about 1% of the total RNA present in the sample.

### RNA Standards Representing Artificial Genes

[0170] RNA standards can be designed to match any artificial gene of interest encoded within the artificial polynucleotide sequence of the artificial chromosome. The contiguous RNA standard sequence matches the artificial exon sequences whilst the intervening intron sequences are excluded (as exemplified in the illustration in FIG. 3). Thus, an RNA standard can comprise or consist of a contiguous nucleotide sequence that corresponds to only the exon sequences of an artificial gene encoded by the artificial chromosome. This emulates the natural process of gene splicing, whereby intron sequences are removed and exons sequences are joined together.

[0171] RNA standards can be designed to emulate the biological process of alternative splicing, where particular exons are included or excluded to form multiple isoforms of a gene loci. In addition, multiple RNA standards matching each of the multiple isoforms generated from a single gene locus can be produced. By combining multiple RNA standards matching multiple alternative mRNA isoforms at different concentrations, alternative splicing events can be simulated, including, for example, intron retention, cassette exons, alternative transcription initiation and termination, non-canonical splicing, and others. The relative abundance of the RNA standards representing each isoform can be varied to correspond to the frequency of the alternative splicing event being represented.

### RNA Standards Representing Artificial Fusion Genes

[0172] A translocation between two artificial chromosomes can join two different artificial genes into a single fusion gene (or “chimera”). RNA standards can be produced so as to match fusion genes generated by translocation between artificial chromosomes.

[0173] Translocations usually affect only one chromosome of a chromosome pair (or of multiple equivalent chromosomes in higher order polyploidy organisms), with the other chromosome within the pair remaining unaffected. Therefore, it can be advantageous to produce RNA standards representing two normal (i.e., non-fused) copies of the gene and a single copy of the fused gene, thereby emulating a heterozygous genotype (as exemplified in the illustration in FIG. 9). The relative concentration of the RNA standard matching the fusion gene can be varied to emulate the likely concentration in a test sample being studied of the particular fusion gene being modelled. For example, in the case of minimal residual diseases, where only a fraction of cells within a tumor sample harbor a translocation allele and express a fusion gene, a low concentration of the artificial fusion gene may be used.

### Production of DNA Standards

[0174] The standard may be a DNA standard. A DNA standard is a DNA molecule that matches and represents an artificial sequence of interest in the artificial chromosome. In one example, the DNA standard matches the sequences of a feature in the artificial chromosome. Thus, the present disclosure also provides a DNA fragment of the artificial sequence of the artificial chromosome disclosed herein. Part or whole of the artificial chromosome sequence can be physically generated as a DNA molecule using any suitable known method of DNA synthesis. Accordingly, the size and content of the DNA standard can vary depending on the particular fragment of the artificial chromosome chosen to form the DNA standard. In one example, the DNA standard can vary in length from 20 nucleotides to 20 Mb.

[0175] The DNA molecule matching the artificial chromosome sequence may be inserted into a vector. Any suitable vector may be used. For example, the vector may be a plasmid vector. The synthesised DNA molecule may be inserted into the vector between any two suitable restriction endonuclease consensus recognition sites. For example, the synthesised DNA molecule may be inserted into the vector between two Type III restriction endonuclease consensus recognition sites (exemplified in the illustration in FIG. 15). This allows the generation of the DNA standard by excision from the vector using one or more restriction endonucleases. Accordingly, the present disclosure provides a method of generating a DNA standard, comprising synthesising a DNA fragment corresponding to a sequence of the artificial chromosome, inserting the DNA fragment into a vector (such as a plasmid vector) and subsequently excising the DNA fragment from the vector by restriction endonuclease digestion.

[0176] Alternative methods of generating DNA standards can be used. For example, the DNA standard (which may, for example, be present in a vector, such as a plasmid vector) may be produced by an amplification reaction. For example, PCR amplification can be used to produce multiple copies of the DNA standard, by using PCR primers that are complementary to the sequence at either end of the DNA standard. Any suitable amplification method known to generate multiple copies of a DNA molecule may be used. An overview of a suitable method for the production of DNA standards is illustrated in FIG. 15.

### Mixtures of Multiple DNA Standards

[0177] Multiple DNA standards can be used collectively as a mixture. Accordingly, the present disclosure provides a mixture of one or more DNA standards disclosed herein. The mixture can comprise any suitable buffer to maintain the structural integrity of the DNA standards.

[0178] Individual DNA standards can be diluted at a range of different concentrations and then combined into a mixture of DNA standards. This mixture of DNA standards across a range of different concentrations can therefore comprise a quantitative scale. The quantitative scale can comprise a ladder of DNA standards at different sequential abundance. This scale can be used as a reference to measure the abundance of natural DNA transcripts within the accompanying sample.

[0179] Alternative mixtures can be produced that differ in the relative concentration of individual DNA standards. Comparison of DNA standards in alternative mixtures can thereby measure differential abundance of the DNA standards, thereby providing a reference scale that can be used to measure changes in abundance of DNA molecules between two or more accompanying samples. For example, differences in the abundance of DNA standards between two mixtures can provide a scale with which to compare differences in the abundance of microbial genome DNA between two samples.

[0180] The number of DNA standards provided per mixture can vary from 3-3000, such as from 3-300 per mixture prepared. For example, a mixture may be provided containing about 90 DNA standards. The DNA standards may be added to a sample of interest so as to constitute from 0.001-50%, such as about 1% of the total DNA present in the sample.

### Conjoined DNA Standards

[0181] Multiple DNA standards can be ligated together (or “conjoined”) into a single contiguous sequence using standard molecular biology techniques, such as restriction digestion and ligation or Gibson assembly (e.g., as illustrated in FIG. 16). Thus, the present disclosure also provides a conjoined DNA standard. The present disclosure also provides a method of preparing a conjoined DNA standard, comprising ligating together two or more DNA standards disclosed herein into a single, contiguous sequence.

[0182] A single conjoined standard can contain an individual DNA standard repeated to multiple copy numbers. Accordingly, copy-number can be employed to establish differential abundance of DNA standards. The present disclosure also provides a method of preparing a conjoined DNA standard comprising multiple individual DNA standards, with each DNA standard being present as multiple copies in the conjoined DNA standard.

[0183] In addition, a single conjoined standard can contain multiple, different individual DNA standards, each copied to any desired copy number, in any combination.

[0184] Variation in the abundance of individual DNA standards can result from errors in pipetting or aliquoting. However, joining multiple individual DNA standards into a large conjoined DNA standard removes any between-individual variation due to the pipetting or aliquoting (because the conjoined DNA standard is aliquoted once).

[0185] The abundance of multiple individual DNA standards at different copy-numbers that comprise a conjoined DNA standard can be used to estimate the error due to pipetting. This is because errors in pipetting the conjoined standard are the same and dependent between the individual DNA standards that are combined together to a conjoined DNA standard. The slope of the line of best fit plotted between the observed to known abundance of individual DNA standards that are joined into a single conjoined DNA standard indicates the estimate of pipetting error for the conjoined DNA standard. Subsequent normalization of DNA standard abundance according to this estimate can minimize this source of variation. This internal normalization approach enables a more accurate measure of abundance,

[0186] Any suitable type and number of individual DNA standards can be joined to form a conjoined DNA standard. In one example, 6 individual DNA standards are joined to form a single conjoined DNA standard. Furthermore, multiple conjoined DNA standards at a range of concentrations can be combined to form a mixture. In another example, 30 conjoined DNA standards are combined to form a mixture.

### DNA Standards Representing Artificial Microbe Genomes

[0187] Metagenomics entails a study of multiple genomes from different organisms, and can be applied to profile a community of microbe genomes. For example, a metagenomic analysis can be used to determine the sequence and to measure the abundance of multiple microbe genomes within a single sample (such as an environmental sample). DNA standards can be prepared that match and represent artificial microbe genomes, thereby emulating a microbial community structure and diversity.

[0188] Thus, the present disclosure provides DNA standards that are based on artificial microbe genomes. Such DNA standards may match only a representative subsequence of the full artificial microbe genomes (e.g., as illustrated in FIG. 10). For example, microbe genome size varies considerably (generally between 0.5 and 7 Mb for common taxa). Therefore, DNA standards may be of proportional length (for example, between 1% size of 0.5 and 7 Kb) to the full-length artificial microbe genomes.

[0189] Furthermore, microbes' genomes exhibit a broad range of percentage GC content (e.g., from 20%-75%). The DNA standards disclosed herein may be of proportional GC content (for example, ranging from 20%-75%) to the full-length artificial microbe genomes. Using DNA standards that match only representative subsequences within the artificial microbe genomes can reduce the sequencing depth required to profile the microbe community whilst maintaining a wide range in abundance between standards that is similar to microbe community structures typically present in natural samples.

### DNA Standards Representing Small-Scale Genetic Variation

[0190] Small-scale genetic variation distinguishes two or more variant alleles of an artificial chromosome sequence (e.g., as illustrated in FIG. 6). DNA standards can be designed to represent such small-scale genetic variation between multiple artificial chromosomes. For example, an individual DNA standard can be generated that matches the sequence of an allele present in a “reference” artificial chromosome, and an individual DNA standard can be generated that matches the sequence of an allele present in a “variant” artificial chromosome.

[0191] The relative abundance of the DNA standard can match the relative frequency of the allele. For example, one DNA standard matching an alternative variant and one DNA standard matching a reference variant at the same abundance can emulate the heterozygous frequency of an allele in a diploid genome. In another example, a single DNA standard matching an alternative variant can emulate homozygous variation in a diploid genome. In another example, one DNA standard matching an alternative variant and one DNA standard matching a reference variant at varying abundance can emulate heterogeneous frequency (present in non-bi-allelic ratios, such as when only a subset of the sample harbors a mutation). Accordingly, DNA standards can be prepared so as to emulate the existence and frequency of genetic variation between artificial chromosomes.

### DNA Standards Representing Large-Scale Structural Variation

[0192] Large-scale genetic variation can distinguish two or more variant alleles of an artificial chromosome sequence. DNA standards can be designed to match and represent such large-scale genetic variation between multiple artificial chromosomes (e.g., as illustrated in FIG. 8). The relative abundance of the DNA standard can match the relative frequency of large-scale variation, and emulate zygosity.

[0193] DNA standards can be provided that match the one or more repeat units in a tandem repeat array (e.g., as illustrated in FIG. 5). Variations in the concentration of DNA standards can also be selected so as to emulate repeat unit copy number. For example, abundant DNA repeat standards can be prepared to correspond to high copy number variants. Conversely, low abundance DNA repeat standards can be prepared to correspond to low copy number variants. In addition, the relative abundance of the DNA standards can also be calibrated to match the desired allele frequency.

### Sequence Barcodes to Distinguish DNA Standards

[0194] To distinguish between DNA standards that match the same DNA sequence (such as the same repeat element), one or more ‘barcode’ nucleotide sequences can be incorporated into DNA standards (e.g., as illustrated in FIG. 17). Barcode nucleotide sequences are typically small (e.g., 4, 5, 6, 7, 8, 9, or 10 nucleotide) contiguous or non-contiguous nucleotide sequences that make up only a small fraction of the total DNA standard sequence. For example, the one or more barcode nucleotide sequences may constitute less than 10%, such as less than 9%, such as less than 8%, such as less than 7%, such as less than 6%, such as less than 5%, such as less than 4%, such as less than 3%, such as less than 2%, such as less than 1% of the total nucleotide sequence of the DNA standard. The existence of a barcode nucleotide sequence can allow the identification of a DNA standard. For example, when multiple DNA standards match the same artificial chromosome sequences, ‘barcode’ nucleotide sequences allow the identification of particular DNA standards within all DNA standards that match the same artificial chromosome sequences. The barcode sequence can be removed or modified during analysis so it does not interfere with the alignment.

### DNA Standards Representing Immune Receptor Clonotypes

[0195] The DNA standards disclosed herein can be designed so as to match and represent artificial clonotypes generated from the immunoglobulins and T-cell receptors gene loci encoded within the corresponding artificial chromosome (e.g., as illustrated in FIGS. 12 and 13). In one example, DNA standards encompass the clonotype sequence of the randomly selected V,D and J segments. The DNA standards disclosed herein may also retain small sequences complementary to universal primer sequences commonly used in immune repertoire sequencing. For example, DNA standards may retain primer sequences described in BIOMED-2 (van Dongen, Langerak et al. 2003) study for profiling natural clonotype diversity.

[0196] A large number of DNA standards, each representing artificial clonotypes can be produced by this method. These DNA standards can be combined into a mixture that emulates the size, diversity, complexity and profile of natural receptor clonotypes typically observed during the immune-repertoire sequencing of human white blood cells.

### DNA Standards Representing 16S Marker Genes

[0197] DNA standards can represent artificial 16S rRNA gene sequences from an artificial microbe genome (e.g., as illustrated in FIG. 11). The artificial 16S rRNA gene has no homology to known sequences, with the exception of retaining two complementary sequences to the universal 16S primers commonly used in amplicon sequencing. This enables the DNA standards to act as a template for PCR amplification with the 16S primers. Amplification of the DNA standards thereby provides a synthetic and quantitative measure of PCR amplification and sequencing of 16S rRNA marker genes commonly used to determine microbe community identity and structure.

### Methods of Use:

[0198] The polynucleotide standards disclosed herein can be used to calibrate a wide variety of sequencing methods. This can be achieved by adding the polynucleotide standards to a sample comprising a target DNA/RNA sequence to be determined. The source of target DNA/RNA can come from any known organism or environmental sample. For example, the polynucleotide standards can be added to a sample of natural RNA derived from animal (such as mammalian, human, or other), plant (such as corn, rice, or other), microbial (such as bacteria, archaea, or other) and environmental (such as soil samples, human stools, clinical samples such as infected wound fluid, and other) sources. It will be appreciated that the polynucleotide standards disclosed herein can be used to calibrate sequencing methods performed on any sample containing a target DNA/RNA sequence to be determined.

[0199] Because the polynucleotide standards disclosed herein have little or no homology (or sequence identity) to natural polynucleotide sequences, sequenced reads derived from the polynucleotide standards can be distinguished from sequenced reads derived from natural RNA/DNA present in a sample (e.g., as illustrated in FIG. 18). Thus, the fragments (standards) disclosed herein may have a percentage identity relative to known, naturally occurring sequences selected to allow sequenced reads derived from the polynucleotide standards to be distinguished from sequenced reads derived from natural RNA/DNA present in a sample. This enables the polynucleotide standards to be added to the RNA/DNA sample, prior to sequencing, and therefore undergo the same library preparation, sequencing, alignment and analysis as for the DNA/RNA sample of interest. However, following sequencing, reads matching polynucleotide standards can be distinguished from reads matching DNA/RNA sample of interest.

[0200] Accordingly, the methods disclosed herein comprise a step of determining the sequence of a target polynucleotide (DNA or RNA) of interest in a sample. The methods disclosed herein also comprise a step of determining the sequence of one or more polynucleotide standards which have been added to the sample. The methods disclosed herein further comprise a step of comparing the sequence and/or quantity of a target polynucleotide (DNA or RNA) of interest in a sample with the sequence and/or quantity of one or more polynucleotide standards which have been added to the sample. Such a comparison allows the normalization of values derived from the measurement of the target polynucleotide in the sample against the values derived from the measurement of the one or more polynucleotide standards. Accordingly, the methods disclosed herein may further comprise a step of normalizing the values derived from the measurement of the target polynucleotide in the sample against the values derived from the measurement of the one or more polynucleotide standards. Any suitable mathematical algorithm capable of normalizing these values can be used.

[0201] In many cases, the polynucleotide standards combined with an RNA/DNA sample constitute only a fraction of the combined total amount of RNA/DNA in the sample. This fractional contribution (typically between 0.1 and 10% of the total amount of RNA/DNA in the sample, or typically less than 10%, such as less than 5%, such as less than 1%, such as less than 0.5% of the total amount of RNA/DNA in the sample) varies according to the type of library preparations used in the analysis (e.g., rRNA removal, polyA or total RNA purification preparations). The fractional contribution of the polynucleotide standards can be inversely proportional to the sequencing depth attributed to the RNA/DNA sample. Therefore, the fractional total can be selected as the minimum amount required to sufficiently enable analysis of the polynucleotide standards.

### Measuring Sequencing Errors in Polynucleotide Standards

[0202] Sequencing errors occur when nucleotides are determined incorrectly, possibly resulting from errors or artefacts of the library preparation or of the sequencing process itself. Analysis of sequenced reads from the polynucleotide standards can identify and quantify nucleotide error differences. Suitable software facilitating the identification of sequencing errors includes Quake (Kelley, Schatz et al. 2010) and SysCall (Meacham, Boffelli et al. 2011). This analysis can then be used to provide a measure of sequence performance and quality. This analysis also then allows a researcher to normalize or correct systematic sequencing errors within reads from the sample DNA/RNA, providing a far more accurate (both qualitatively and quantitatively) measurement of the target DNA/RNA of interest in the sample. The sequencing error profile of the polynucleotide standards can also be employed to distinguish sequencing errors from genuine nucleotide differences (such as SNPS or nucleotide modifications).

Assessing Sequence Alignments with Polynucleotide Standards

[0203] During a sequencing operation, small sequenced reads are often first aligned to a reference genome. The alignment of reads to a large reference genome is a computationally intensive task that can be performed in numerous ways, providing differential outcomes for speed, sensitivity and accuracy. The polynucleotide standards disclosed herein can be used to assess the efficiency and accuracy with which sequenced reads are aligned to the artificial chromosome disclosed herein, thereby calibrating the alignment methods performed. Accordingly, the methods disclosed herein may further comprise a step of aligning sequenced reads derived from the polynucleotide standards to the artificial chromosome from which those standards were derived. Any suitable alignment methods can be used to perform this step. Example of suitable software facilitating the alignment of sequence reads include BWA (Li and Durbin 2009, Kelley, Schatz et al. 2010) and Bowtie (Langmead, Trapnell et al. 2009)

[0204] Sequenced reads are preferably aligned to both the reference genome and artificial chromosome concurrently. In one example, the artificial chromosome sequence combined with the reference genome to make an index that facilitates rapid alignment. This enables sequenced reads to be simultaneously aligned to both the artificial chromosome and reference genome (e.g., as illustrated in FIG. 18). By the assessing the accuracy and sensitivity with which reads align to the artificial chromosome, a parallel and empirical assessment of reads aligning to the natural genome can be performed simultaneously.

[0205] The alignment of reads derived from the polynucleotide standards disclosed herein to the artificial chromosome can be assessed according to a number of characteristics, such as (but not limited to): sensitivity and specificity of correct read alignments; and/or proportion of reads-pairs mapped concordantly discordantly, or with dovetail; and/or alignment mismatches and base-wise accuracy.

[0206] RNA sequenced reads that traverse introns are required to be aligned to the reference genome in a split or non-contiguous manner. Disclosed herein are RNA standards that are designed to emulate the splicing of introns and exons. Such RNA standards can therefore be used to assess the split alignment of reads across introns. Split reads derived from the RNA standards can be aligned to both the artificial and natural chromosome. Examples of suitable software facilitating the split alignment of sequence reads include Tophat2 (Kim, Pertea et al. 2013) and STAR (Dobin, Davis et al. 2013). Split alignments on the artificial chromosomes can then be compared to artificial gene annotations to assess the sensitivity and specificity with which reads align across introns.

[0207] Alternative splicing, transcription initiation and termination generate a range of isoforms from single gene loci. Also disclosed herein are RNA standards that can be used to assess the accuracy with which spliced and unspliced alignments are assembled into full-length transcript models. For example, full-length transcript isoforms can be assembled from overlapping read alignments on both the artificial and natural chromosomes. Example of suitable software facilitating the assembly of sequence reads include Cufflinks (Trapnell, Williams et al. 2010) and Trinity (Haas, Papanicolaou et al. 2013). The structure of RNA transcripts assembled on can then be compared to artificial gene annotations to assess the sensitivity and specificity with which transcript assembly has occurred (e.g., as illustrated in FIG. 3). This assessment can then be used to inform the assembly of gene models in the accompanying natural sample.

Assessing Quantitative Accuracy with Polynucleotide Standards

[0208] Individual polynucleotide standards can be diluted to known concentrations, and collectively combined to form a mixture that provides a quantitative scale of such standards. The particular values chosen to define the scale can be determined based on the likely quantities of target RNA/DNA present in the sample to be analysed. Following sequencing, the number of reads aligning to the polynucleotide standards can provide a quantitative measure of abundance. Comparison between the known molar concentration and measured read abundance of the polynucleotide standards can be used to inform the quantitative analysis within and between samples in a number of ways, including (but not limited to):
[0209] (i) Comparison of a known concentration of the polynucleotide standards to measured abundance of the same polynucleotide standards indicates the quantitative accuracy of the DNA/RNA sequencing method.
[0210] (ii) Dynamic range (the difference between the highest and lowest abundance of the polynucleotide standards) indicates quantitative linearity (or parts thereof). Departure from these expectations may allow the performance of quantitative normalization.
[0211] (iii) Lower limit of detection (the lowest concentration of polynucleotide standard detected) indicates library size and sensitivity.
[0212] (iv) Quantified polynucleotide standards comprise an internal reference for quantifying genes at corresponding abundance.
[0213] (v) Enables conversion of sequencing units (R/FPKM) to molar or absolute (transcript copy number) units.
[0214] (vi) Quantitative range of RNA standards enables normalization between two or more samples and enables comparative analysis of gene expression.
   Measuring Gene Expression with RNA Standards

[0215] Gene expression profiling measures the abundance of multiple genes using RNA sequencing reads. The RNA standards disclosed herein can be added at a range of concentrations to form a mixture and thereby emulate differential gene expression. The accuracy with which the abundance of RNA standards is measured can be assessed, thereby assessing the quantitative accuracy of gene expression analysis in the accompanying natural RNA sample (e.g., as illustrated in FIG. 19).

[0216] Multiple RNA standards can be combined across a range of known concentrations and collectively combined to form different mixtures, emulating differential gene abundance, and fold changes in gene expression between samples. The abundance of RNA standards can be measured. Example of suitable software facilitating the quantification of RNA standards include EdgeR (Robinson, McCarthy et al. 2010) and DEseq (Anders, McCarthy et al. 2013). Comparing the measured abundance of RNA standards against their known molar concentration can indicate the accuracy of transcript quantification. Comparing the abundance of natural genes against RNA standards or the quantitative reference scale comprising multiple RNA standards can also inform measures of gene expression.

[0217] Similarly, alternative RNA standard isoforms can be included at different concentrations to emulate alternative splicing. The abundance of RNAs standard isoforms can be measured using suitable software, such Cufflinks (Trapnell, Williams et al. 2010) or MISO (Katz, Wang et al. 2010). The observed fold-change in RNA standard isoform abundance between mixtures can be determined to assess the accuracy with which isoform switching and alternative splicing is measured between samples, independent of changes in gene expression. Comparing the abundance of natural isoforms against RNA standards can also inform measures of alternative splicing.

### Detecting Small-Scale Genetic Variation Represented by DNA Standards

[0218] DNA standards disclosed herein can be generated that represent variant and reference alleles of small-scale genetic variation in the artificial chromosome (e.g., as illustrated in FIG. 6). A range of variables can impact on variant identification and genotype assignment including (but not limited to): variant zygosity; read alignment, quality and/or coverage; variant type and complexity (eg. SNPs, indels, homopolymers); proximal sequence context; and software used to identify small-scale genetic variation. The DNA standards disclosed herein can be used to assess the sensitivity and specificity with which small-scale genetic variation is identified. Sequence determination of DNA standards can identify small-scale variation with respect to reference artificial chromosome sequence. Suitable software for identifying small-scale genetic variation include GATK (McKenna, Hanna et al. 2010) and SAMtools (Li, Handsaker et al. 2009). The accuracy and sensitivity with which small-scale genetic variation is detected within the DNA standards can be assessed with respect to the artificial chromosome (e.g., as illustrated in FIG. 20). A value of uncertainty (such as a 95% confidence interval) can also be ascribed to estimates of accuracy. Comparing the confidence and sensitivity with which small-scale genetic variation is identified in the artificial chromosomes can also inform the identification of small-scale genetic variation in the accompanying DNA sample.

### Measuring the Allele Frequency Represented by DNA Standards

[0219] The accurate quantification of an allele's frequency is required to correctly assign a genotype or estimate the fraction of DNA within a sample carrying a variant (such as when a subset of cancer cells within a tumor sample carry a deleterious variant). The DNA standards disclosed herein can be used to emulate differential allele frequency, and thereby assess or calibrate the quantitative accuracy with which allele frequency is measured.

[0220] For example, DNA standards representing different alleles can be combined at varying concentrations into a mixture that is combined with the natural DNA sample for sequencing. Comparison between the known molar concentration and measured read abundance of each of the variant alleles (each represented by different DNA standards) then enables a quantitative assessment of allele frequency to be performed. Thus, the DNA standards disclosed herein can be used to determine the sensitivity, specificity and precision of variant detection at different relative concentrations and to establish a quantitative scale for comparison with the detection and/or quantification of natural, target variant alleles. Thus, the methods disclosed herein can comprise a step of preparing a mixture of DNA standards representing variant alleles, wherein each variant DNA standard is added at a predetermined concentration. The methods may also comprise determining the sequence and quantity of each of the variant DNA standards in the mixture. The methods disclosed herein may further comprise a step of providing a quantitative scale of measured variant DNA standard frequency, which scale can then be used to calibrate the quantitative measure of natural DNA alleles determined in a single DNA sample, or between multiple DNA samples.

### Resolving Large-Scale Variation Represented by DNA Standards

[0221] Large-scale or structural genetic variation can be computationally difficult to resolve correctly as it is often larger than the length of sequenced reads. DNA standards disclosed herein can be generated that represent and emulate large-scale variation. For example, DNA standards representing structural variation can be used to: assess the ability of software programs to correctly resolve structure; and quantify the relative abundance and copy number of structural variants, and/or to assign a genotype to a sequence comprising structural variation. Suitable software for resolving large-scale variation include BreakDancer (Chen, Wallis et al. 2009) and Cortex (Igbal, Caccamo et al. 2012). The DNA standards disclosed herein can also be used to model the re-distribution of sequence reads due to structural variation with respect to the reference artificial chromosome. The measurement of DNA standards can inform an assessment of the accuracy with which large-scale variation is identified and quantified within the accompanying natural genome DNA sample.

### De Novo Assembly of DNA Standards

[0222] In cases where no naturally occurring reference genome is available, genome sequences must be assembled de novo from overlapping sequence reads. Parallel de novo assembly of DNA standards can be performed simultaneously with the accompanying target genome DNA sample. Suitable software for de novo assembly includes Velvet (Zerbino and Birney 2008) and ABySS (Simpson, Wong et al. 2009). Variables that affect genome assembly include (but are not limited to): genome complexity and repeat content; ploidy; sequencing depth, quality and error rate; read length and insert size; and software program and parameters (including k-mer length, alignment approach, read soft-clipping, and other parameters) used. The impact of these variables on the de novo assembly of DNA standard can be assessed.

[0223] The assembled sequence can be compared to the known DNA standards to assess the performance of de novo assembly and impact of variables described above. De novo assembly of the artificial chromosome can be assessed according to any one or more of: N50 value; median, maximum and/or combined contig sizes; coverage and gaps of contigs relative to the artificial chromosome; mismatch or base-wise accuracy of contigs relative to the artificial chromosome; and the identification of large or systematic assembly errors. The assessment of de novo assembly of DNA standards can inform an assessment of de novo assembly of the accompanying target natural DNA sample.

Metagenome Analysis with DNA Standards

[0224] Metagenome analysis often comprises the assembly and quantification of multiple microbe genomes from an environmental sample. The DNA standards disclosed herein can be used to emulate a complex microbe community, constituting a heterogeneous collection of genomes at a range of different abundances (e.g., as illustrated in FIG. 10). These DNA standards representing microbe genomes can be used to assess metagenome analysis. Variables that affect metagenome analysis include (but are not limited to): microbe community genome sizes, complexity, repeat and GC content, and user-defined variables such as sequencing depth and coverage, quality, read length and insert size, and software and parameters used. The impact of these variables on the metagenome analysis of DNA standard can be assessed.

[0225] The metagenome DNA standards disclosed herein can be used to assess the performance of de novo assembly and analysis (e.g., as illustrated in FIG. 21). The assembly of DNA standards in relation to the artificial chromosome can be assessed according to a number of features including (but not limited to): N50 value; and median and maximum contig size; coverage; base-wise accuracy of assembled DNA standard contigs can be compared relative to the corresponding artificial chromosome. The assessment of metagenome analysis of DNA standards can inform an assessment of the metagenome analysis of the accompanying target natural DNA sample.

[0226] NGS sequencing can determine the abundance and diversity of microbes within a sampled community. The DNA standards disclosed herein can be combined at different relative concentrations to form a mixture that comprises a quantitative reference. The methods disclosed herein may further comprise a step of providing a quantitative scale of measured metagenome DNA standard frequency, which scale can then be used to calibrate the quantitative measure of natural microbe genomes determined in the accompanying environmental sample.

[0227] The DNA standards can also be used to assess metagenome analysis relative to quantitative abundance. For example, the DNA standards can be used to assess (without limitation): the minimum sequence coverage required for efficient assembly; the lower limit of detection (i.e. the lowest concentration at which metagenome DNA standards are detected); and measures of library sensitivity, size and/or diversity. The metagenome DNA standards disclosed herein can also be used for quantitative comparison between two or more samples, which enables a comparative analysis of microbe community structure and diversity to be performed between two or more samples.

16S rRNA Profiling with DNA Standards

[0228] The 16S rRNA gene is often used as a phylogenetic marker for profiling large of complex microbe communities. DNA standards can be generated that represent and match a portion of the 16s rRNA genes from artificial microbe genomes (e.g., as illustrated in FIG. 11). Furthermore, DNA standards representing artificial 16S rRNA genes can be combined at different relative concentration to emulate a microbe community and to allow an assessment of 16S profiling applications to be performed.

[0229] DNA standards matching the artificial 16S rRNA genes can retain small sequences complementary to universal primers, and therefore amplify in parallel to natural 16S rRNA genes. The resulting amplicons from the DNA standards can then be analyzed to assess any one or more of: (i) differential PCR amplification bias; and (ii) quantitative accuracy by comparing the measure abundance of DNA standard amplicons relative to the known initial concentration of those DNA standards. In addition, the resulting amplicons from the DNA standards can be used to establish a quantitative scale for comparison to quantify amplicons from the accompanying metagenome sample of interest.

Identifying GC Bias with DNA Standards

[0230] The impact of GC content on several reactions during library preparation and sequencing results in a skewed representation of microbe genomes that causes biases in assembly and quantification (Chen, Y. C., et al., 2013). The DNA standards disclosed herein can be used to assess the impact of GC content on sequencing and analysis.

[0231] DNA standards can be produced that match the wide range of GC-contents observed in microbe genomes. DNA standards can be combined within environmental DNA samples prior to sequencing and analysis. Biases in the alignment, assembly and/or quantification of DNA standards that correlate with GC-content can be identified. For example, differences between the measured abundance and known concentration of DNA standards can identify bias associated with GC-content, which in turn can allow subsequent quantitative normalization to counter impact of GC-content. The DNA standards disclosed herein can also be employed as a training set to establish normalization parameters that minimize GC-content bias in DNA quantification.

Using DNA Standards with Immune Receptor Sequencing

[0232] Immune repertoire sequencing employs a common set of primers to amplify the suite of immune receptor sequences expressed by white blood cells The DNA standards disclosed herein can be designed so as to represent artificial clonotypes on the artificial chromosome (examples illustrated in FIGS. 12 and 13). The range and complexity of clonotype DNA standards can be tailored to emulate the complex and diverse profile of natural clonotypes expressed by a sample of white blood cells.

[0233] The DNA standards disclosed herein may also retain small sequences complementary to each primer pair commonly used in immune repertoire sequencing. Therefore, PCR amplification can be used to amplify the natural clonotypes of interest within the sample, but also the clonotypes represented by the DNA standards. Therefore, DNA standards can act as templates for amplification using universal primers during immune repertoire sequencing. Following amplification and sequencing, reads derived from DNA standards can be analysed to assess the performance of immune repertoire sequencing and to quantify the relative abundance of different clonotypes. DNA standards can also be used to determine amplification bias of different universal primers that can be due to differences in hybridisation efficiency. Amplification biases can be determined by comparing the measured abundance of DNA standard amplicons relative to the known initial concentration of the DNA standards. Clonotype abundance can be subsequently normalised to count determined amplification bias. The DNA standards disclosed herein can also be used to assess the detection and quantification of artificial clonotypes that can inform an assessment of clonotype detection and quantification of the accompanying target natural DNA sample.

[0234] Any of the methods disclosed herein may comprise adding two or more fragments (or standards) disclosed herein to a sample at the same or different concentrations in order to replicate homozygosity, heterozygosity or heterogeneity. For example, two different fragments (or standards) may be added at the same concentrations to replicate heterozygosity. Thus, adding fragments (or standards) at different concentrations can replicated homozygosity, heterozygosity or heterogeneity.

### Kits:

[0235] As will be appreciated from the above, the present disclosure also provides kits comprising one or more polynucleotide standards disclosed herein. Alternatively or in addition, the kits may comprise one or more vectors disclosed herein, which vectors comprise one or more polynucleotide sequences encoding one or more standards disclosed herein. The kits may also comprise one or more components suitable for expressing the vectors in order to produce the polynucleotide standards. The kits may comprise both the polynucleotide standards disclosed herein and the vectors disclosed herein. The kits may also be provided with information describing the particular polynucleotide standard contained therein, such as (but not limited to) its sequence, concentration, structural genomic features of interest, etc. The kits may also comprise one or more artificial chromosomes disclosed herein.

[0236] The kits may comprise a mixture of any one or more of the polynucleotide standards and/or vectors disclosed herein, in any combination. The mixture of standards and/or vectors may be provided together, in a single buffer, which may be provided in one or more containers. Alternatively, the mixture of standards and/or vectors may be provided in the form of multiple, separate containers, each comprising a single standard and/or vector, or a single concentration of a standard and/or vector. The separate containers may be provided in association with each other as a kit.

[0237] The kits may further comprise the computer apparatus, computer programmable media, and/or the computer software disclosed herein. Thus, the kits may be provided as a package allowing the physical polynucleotide standards to be used experimentally and allowing the computer apparatus and software to be used to relate the experimentally derived sequencing information to the artificial chromosome.

### Computer System and Computer Implemented Method:

[0238] The present disclosure also provides a computer system and a computer implemented method. FIG. 38 illustrates a suitable computer system 3800 for calibrating a polynucleotide sequencing process. The computer system 3800 comprises a processor 3802 connected to a program memory 3804, a data memory 3806, a communication port 3808 and a user port 3810. The program memory 3804 is a non-transitory computer readable medium, such as a hard drive, a solid state disk or CD-ROM. Software, that is, an executable program stored on program memory 3804 causes the processor 3802 to perform the method disclosed herein.

[0239] The processor 3802 may then store the calibrated results on data store 3806, such as on RAM or a processor register. Processor 3802 may also send the calibrated results via communication port 3808 to a server, such as sample sequence database or computer system that manages a polynucleotide sequencing experiment.

[0240] The processor 3802 may receive data, such as data indicative of a polynucleotide sequence, fragments of an artificial chromosome or sequences of the sample, from data memory 3806 as well as from the communications port 3808 and the user port 3810, which is connected to a display 3812 that shows a visual representation 3814 of the sequencing result to a user 3816. In one example, the processor 3802 receives sequence data from a sequencing device via communications port 3808, such as by using a Wi-Fi network according to IEEE 802.11. The Wi-Fi network may be a decentralised ad-hoc network, such that no dedicated management infrastructure, such as a router, is required or a centralised network with a router or access point managing the network.

[0241] Although communications port 3808 and user port 3810 are shown as distinct entities, it is to be understood that any kind of data port may be used to receive data, such as a network connection, a memory interface, a pin of the chip package of processor 3802, or logical ports, such as IP sockets or parameters of functions stored on program memory 3804 and executed by processor 3802. These parameters may be stored on data memory 3806 and may be handled by-value or by-reference, that is, as a pointer, in the source code.

[0242] The processor 3802 may receive data through all these interfaces, which includes memory access of volatile memory, such as cache or RAM, or non-volatile memory, such as an optical disk drive, hard disk drive, storage server or cloud storage. The computer system 3800 may further be implemented within a cloud computing environment, such as a managed group of interconnected servers hosting a dynamic number of virtual machines.

[0243] It is to be understood that any receiving step may be preceded by the processor 3802 determining or computing the data that is later received. For example, the processor 3802 may determine the sequence data of the artificial chromosome and may store the sequence data in data memory 3806, such as RAM or a processor register. The processor 3802 may then request the data from the data memory 3806, such as by providing a read signal together with a memory address. The data memory 3806 may provide the data as a voltage signal on a physical bit line and the processor 3802 may receive the sequence data of the artificial chromosome via a memory interface.

[0244] It is to be understood that throughout this disclosure unless stated otherwise, data may be represented by data structures, such as [“G”, “A”, “T”, “C”] strings or list of binary tuples encoding the nucleotides. The data structures can be physically stored on data memory 3806 or processed by processor 3802.

[0245] It should be understood that the techniques of the present disclosure might be implemented using a variety of technologies. For example, the methods described herein may be implemented by a series of computer executable instructions residing on a suitable computer readable medium. Suitable computer readable media may include volatile (e.g. RAM) and/or non-volatile (e.g. ROM, disk) memory, carrier waves and transmission media. Exemplary carrier waves may take the form of electrical, electromagnetic or optical signals conveying digital data steams along a local network or a publically accessible network such as the internet.

[0246] It should also be understood that, unless specifically stated otherwise as apparent from the following discussion, it is appreciated that throughout the description, discussions utilizing terms such as “processing” or “computing” or “calculating”, or “determining” or “displaying” or “calibrating” or “normalizing” or the like, can refer to the action and processes of a computer system, or similar electronic computing device, that processes and transforms data represented as physical (electronic) quantities within the computer system's registers and memories into other data similarly represented as physical quantities within the computer system memories or registers or other such information storage, transmission or display devices.

[0247] The present disclosure is now described further in the following non-limiting examples.

### Example 1

[0248] One example of an artificial chromosome was prepared as follows. We retrieved a 5,000 nt sequence from human chr7: 27,133,500-27,138,500 (hg19). This sequence overlaps a CpG island (a sequence containing a density of CpG dinucleotides) in the promoter of the HOXA1 gene. To remove homology we shuffled the 5,000 nt sequence whilst maintaining CG dinucleotide pairings with a shuffling window size of 50 nt. This process is illustrated in FIG. 2. Shuffling the primary DNA sequence within windows rearranges the sequence to remove homology, whilst maintaining genetic features at a resolution larger than the window size. Where required, additional nucleotide substitutions, insertions and deletions were manually created to remove homology to known natural sequences. The resultant shuffled sequence was compared to the Nucleotide collection (nr/nt) database using the BLASTn software program (Altschul, S. F. et al., J Mol Biol 215, 403-10 (1990)) to confirm the absence of any sequence with greater than 21 nt contiguous homology with any known or natural sequence. This example method produced a 5,000 nt sequence that has no homology to known or natural sequences, but retains the higher-order CpG island genetic feature at resolution of 50 nt within the HOXA1 promoter.

### Example 2

[0249] One example of an artificial gene sequence in an artificial chromosome was prepared as follows. We first retrieved a gene sequence from the human genome (hg19) that comprises 12 exons and 11 introns. Individual exon and intron sequences as well as upstream/downstream 1,000 nt sequences were retrieved. Each gene exon and intron sequence was individually shuffled with a 20 nt window size to remove homology as described in Example 1. Shuffled exon and intron sequences were then assembled within the artificial chromosome in the correct order, with the orientation and distribution retained as for the original gene within the human genome. This artificial gene is denoted R_1_2_R as shown in FIG. 3. The nucleotides immediately flanking inserted exons was manually edited to insert canonical dinucleotide AG-CT splice sites and poly-pyrimidine track nucleotides. Thus, the artificial gene retains the higher-level genetic features of gene loci that are present in natural human genes, but retains no primary sequence homology with the original human gene or with any other known nucleotide sequence.

### Example 3

[0250] One example of the inclusion of multiple genes, with each gene comprising multiple isoforms, into an artificial chromosome was performed as follows. We first retrieved human mRNA isoform sequences from the GENCODE v19 basic gene assembly (Harrow, Denoeud et al. 2006). Isoforms were ranked by combined exon length, exon number and isoform number. Thirty genes comprising two or more alternate isoforms were systematically sampled from this list. These isoforms were curated to include different examples of alternative gene splicing, including exon exclusion, exon inclusion, alternative transcription initiation, alternative transcription termination, intron retention and alternative 3′ and 5′ splice site usage. Each gene exon and intron sequence from the human genome (hg19) was retrieved and individually shuffled as described above in Example 1 to remove homology. Each shuffled sequence was then re-assembled in the artificial chromosome to maintain exon-intron structure but remove homology to natural sequences. Distance between inserted gene loci in the artificial chromosome was maintained as similar as possible to distances typically observed between genes in the human genome. By this process we incorporated 30 artificial gene loci in the artificial chromosome as illustrated in FIG. 1.

### Example 4

[0251] One example of a mobile element for inclusion in an artificial chromosome was prepared as follows. We retrieved natural human DNA sequences for five instances of mobile elements from common repeat classes (AluSx, MIRb, L2a etc.) (A. F. A. Smit, R. Hubley & P. Green RepeatMasker at repeatmasker.org). Repeat sequences were shuffled and curated as described above in Example 1 to remove homology. Shuffled repeat sequences were duplicated to a sufficient number so as be inserted into an artificial chromosome at the same density as present in the human genome. For example, a 8 Mb artificial chromosome sequence will have 788 AluSx, 534 MIRb, 433 L2a, 93 MER5B and 166 LIM5 repeat mobile elements to match the density of analogous natural repeat elements in the human genome. Individual repeat elements were then subjected to random nucleotide substitutions, insertions, and deletions to cause sequence divergence of individual repeat mobile elements from ancestral sequence, as illustrated in FIG. 4. Sequence and length divergence of shuffled repeat mobile elements can be designed to match the sequence and length divergence of analogous natural elements in the human genome. Shuffled repeat motifs were then inserted into an artificial chromosome sequence with same density and distribution as analogous natural mobile elements in the human genome, as illustrated in FIG. 1.

[0252] One example of a centromere for inclusion in an artificial chromosome was prepared as follows. We retrieved a single 171 nt tandem repeat DNA sequence from an individual ALR/Alpha centromere in the human genome (A. F. A. Smit, R. Hubley & P. Green RepeatMasker at repeatmasker.org). This natural 171 nt tandem repeat DNA sequence was shuffled and curated to remove homology to natural sequences and forms the ancestral repeat. From this ancestral repeat we performed 4 consecutive rounds of 4-fold amplification followed by 14% sequence divergence by random nucleotide substitution, insertions, and deletion. This resulted in a formation of a 10,944 nucleotide long artificial centromere element with internal hierarchal repeat structure analogous to that of the original human sequence, but sharing no sequence identity with the original human sequence. The artificial centromere element was then inserted into a central region of a chromosome sequence, as illustrated in FIG. 1.

[0253] One example of a telomere for inclusion in an artificial chromosome was prepared as follows. We manually generated an artificial 6-mer nucleotide ancestral repeat motif (ATTGGG), which we subjected to multiple rounds of amplification and simulated sequence divergence to generate two 10.9 and 8.3 kb long artificial telomere sequences, which were then added to each terminal end of the artificial chromosome sequence, as illustrated in FIG. 1.

### Example 5

[0254] One example of small-scale genetic variation for inclusion in an artificial chromosome was prepared as follows. A list of human small-scale variation, including SNPs, insertions, deletions, heterozygous, microsatellite and multiple nucleotide polymorphisms (Sherry, S. T. et al. Nucleic Acids Res 29, 308-11 (2001) was ranked according to mutation type, nucleotide content and size. A total of 512 small-scale variants were systematically sampled from this list. Selected small-scale variants was manually curated to ensure representation of a wide range of mutation type, nucleotide content and size. The DNA sequence of human small-scale variation along with upstream and downstream flanking 5 nucleotide sequences was retrieved from the human genome sequence (hg19). We then substituted 268 small-scale variations into two artificial chromosomes, thereby producing a pair of variant artificial chromosomes that incorporate homozygous variation relative to the original ‘reference’ artificial chromosome. We next substituted 289 small-scale variations into only one single artificial variant allele chromosome, thereby producing heterozygous variation relative to the original ‘reference’ artificial chromosome. By this process, we can represent homo- and heterozygous small-scale variation in artificial chromosomes.

### Example 6

[0255] One example of the incorporation of disease-specific, small-scale genetic variation into an artificial chromosome was performed as follows. The BRAF V600E mutation results in an amino acid substitution at position 600 in the BRAF protein from a valine (V) to a glutamic acid (E) and is found in ˜85% of melanoma cases (Davies, H. et al. Nature 417, 949-54 (2002)). DNA sequences matching either the wild type (T) or disease-associated variant BRAF V600E mutation (A) and the flanking upstream and downstream 150 nucleotides were retrieved from the human genome (corresponding to chr7: 140,452,986-140,453,286 in the hg19 assembly). The 6 upstream and downstream nucleotides to the BRAF V600E mutation were not shuffled. However, the remaining flanking sequence was shuffled in increasingly large window sizes with increasing distance from the site of the BRAF V600E variation, as illustrated in FIG. 7. For example, the sequence was shuffled with 6 nt window size when within 20 nt distance of BRAF V600E variation, 10 nt window size when within 100 nt distance of BRAF V600E variation, and 20 nt window size when greater than 100 nt distance of BRAF V600E variation. This removed homology with known natural sequences across the entire gene sequence, but increased the window resolution of shuffling in close proximity to the variant. The shuffled sequence was then substituted into the ‘reference’ artificial chromosome to form an artificial variant chromosome carrying the BRAF V600E mutation.

[0256] In another example, the K562 cell line contains a frame shift nucleotide insertion at ch17: 7578523-7578524 (hg19) in the TP53 gene sequence (Law, J. C. et al., Leuk Res 17, 1045-50 (1993)). The DNA sequences matching either the reference (T) or disease-associated variant TP53 Q136fs mutation (TG) and the flanking upstream and downstream 150 nucleotides were retrieved from the human genome (corresponding to chr17: 7,578,374-7,578,674 in hg19 assembly). The 6 upstream and downstream nucleotides to the TP53 Q136fs mutation were not shuffled, with the remaining sequence shuffled with increasing window size per distance from TP53 Q136fs as described above. This sequence was then substituted into the ‘reference’ artificial chromosome to form an artificial variant chromosome carrying the TP53 Q136fs mutation.

### Example 7

[0257] One example of the incorporation of large-scale genetic variation (>50 nt) into an artificial chromosome was performed as follows. A catalogue of human large-scale variation (Sherry, Ward et al. 2001, MacDonald, Ziman et al. 2014) was ranked according to mutation type, nucleotide content and size. A total of 12 examples of large-scale variation were systematically sampled from the list of human large-scale variation and manually curated to ensure full representation of the diverse range of different types of large-scale variation, including large deletions, insertions, inversions (transversions), copy number variation and mobile-element insertions. The sequence of the structural variation, with an additional 1,000 nucleotide of flanking upstream and downstream sequence, was shuffled and curated to remove homology to known natural sequences, as previously described for Example 1. Notably, where possible shuffling was performed with respect to any internal structure (such as repeat or inverted units) of the large-scale variation where possible to maintain the internal hierarchy, as previously described in Example 4. These instances of structural variation are then inserted into the artificial chromosome sequence to produce a variant artificial chromosome. In this manner, we inserted 12 examples of large-scale structural variation of four different types within the artificial chromosome, as illustrated in FIG. 12. A range of genotypes (homozygous and heterozygous) for structural variation can be established by the use of multiple variant artificial chromosomes with respect to the ‘reference’ artificial chromosome as described by the method in Example 6 above.

[0258] In another example, we incorporated DNA repeats that vary in copy number between multiple artificial chromosome as follows. We retrieved the DNA sequence for a single D4Z4 repeat copy from the human genome (hg19) and shuffled with a window size matching the repeat copy size to remove homology to known natural sequences, as illustrated in FIG. 33. The shuffled D4Z4 repeat copy is then replicated and organized in a head-to-tail orientation to form arrays of 10, 20, 50, 100 and 200 shuffled D4Z4 repeat copies. These repeat copy numbers encompasses the majority (99%) of observed D4Z4 copy number in human subjects (Schaap, Lemmers et al. 2013). This includes copy number at 10 copies (exhibited by 95% of FSMD patients, 20 copies (high-risk individuals), 50 copies (for related individuals) and more than 100 copies (for unaffected individuals) (van der Maarel and Frants 2005). Each repeat arrays was then incorporated into artificial chromosomes, thereby producing a range of different genotypes that vary in artificial D4Z4 repeat copy numbers.

### Example 8

[0259] One example of the formation of a fusion gene by translocation between two artificial chromosomes was performed as follows. We first produced two artificial chromosomes encoding two artificial genes, B1 and an A1 gene, using methods previously described in Example 2. The exon/intron structure of A1 and B1 genes was derived from the human ABL1 and BCR genes respectively. The B1 gene comprises 23 exons/21 introns on artificial chromosome A and sequences representing the A1 gene comprising 11 exons were generated on artificial chromosome B, as illustrated in FIG. 9. The exon/intron structure of the genes was maintained within each artificial chromosome, but DNA sequences were shuffled to remove homology by methods described in Example 1 above. The artificial chromosome A and B sequence was then rearranged by a translocation (i) after exon 4 in the B1 gene and (ii) before exon 2 in the A1 gene, thereby generated a fusion gene comprising B1 exons 1 to 13 and A1 exons 2 to 11 on artificial chromosome A and a fusion gene matching A1 exons 1 and B1 exons 14 to 22 on artificial chromosome B, as illustrated in FIG. 9. By this process, we performed a translocation of two artificial chromosomes to form a fusion gene event.

### Example 9

[0260] One example of the use of the artificial chromosomes disclosed herein to simulate microbe genome communities was performed as follows. Environmental DNA samples often contain a complex community of multiple microbe genomes. Here, we simulated a complex community of multiple artificial chromosomes representing microbe genomes (referred to herein as “artificial microbe genomes”) of differing types, sizes, and abundance. Firstly, we retrieved high quality draft genome sequences (Chan, P. P., et al., Nucleic Acids Res 40, D646-52 (2012)) for total of 30 microbes. Selected microbe genomes were manually curated to ensure representation of wide range of taxa (including both archeae and bacteria), size (0.5-10 Mbp), GC content (27-70%), rRNA operon count (1-10), and isolation from a diverse range of environments (human body, aquatic, terrestrial and extreme physical or chemical conditions). The selection (shown in Table 9) is aimed to represent the phylogenetic and genomic heterogeneity often encountered in a complex microbial population within an environmental DNA sample. Genome sequences were shuffled and manipulated to remove sequences with any sequence homology to known natural sequences. By this process, we produced a library of 30 artificial microbe genomes.

[0261] Another example of incorporating 16S rRNA genes into microbe genomes was performed. We retrieved the 16S rRNA sequences corresponding to the 30 microbe genome sequences, as indicated in Table 9, from which artificial microbe genomes were previously produced using methods described above. 16S rRNA sequences were shuffled and manually edited to remove homology to known natural sequences as previously described in Example 1. However, sequences required for the universal 16S primers (forward primer: CTACGGGAGGCAGCAG (SEQ ID NO: 480) and reverse primer: GACTACCAGGGTATCTAATCC (SEQ ID NO: 481)) are retained. These primer sequences flanking approximately 460 nt of shuffled sequence corresponding to the V3 region within the 16S rRNA gene, as illustrated in FIG. 11. This intervening shuffled V3 sequence comprises an artificial marker with no homology to known natural sequences that will be amplified using universal 16S primers in a polymerase chain reaction. The synthetic marker 16S rRNA genes are assembled into the artificial microbe genome sequence with a frequency respecting the operon count (1-10) of the original microbe from which the microbe genome sequence was derived.

### Example 10

[0262] One example of the simulation of mammalian immunoglobulin sequence diversity using the artificial chromosomes disclosed herein was performed. The generation of artificial immune repertoire sequences allows the use of nucleotide standards to assess the accuracy and quantification of clonotypes during immune repertoire sequencing. We produced a TCRβ locus on an artificial chromosome and modelled the process of V(D)J recombination to produce a suite of artificial TCRβ clonotypes. Firstly, we retrieved the TCRβ 3 gene sequence (which comprises 65 Vβ segments, 2 Dβ segments and 13 Jβ segments) from the human genome (hg19). Each segment or intronic sequence was separately shuffled to remove homology to known natural sequences, with the exception of sequences complementary to primer sequences used in the BIOMED-2 study (van Dongen, J. J. et al. Leukemia 17, 2257-317 (2003)). Shuffled segments and flanking intronic sequences were then re-assembled to incorporate a TCRβ 3 loci on the artificial chromosome, as illustrated in FIG. 13.

[0263] The artificial TCRβ loci then underwent a simplified simulation of the biological processes that occur during T-cell differentiation of V(D)J recombination and somatic hypermutation to produce a TCRβ 3 clone as follows. V(D)J recombination was simulated by the selection and joining of the Vβ, Dβ and Jβ segments corresponded to randomly selected TCRβ clonotypes previously identified within adult healthy males (Zvyagin, I. V. et al. Proc Natl Acad Sci U SA 111, 5980-5 (2014)). Somatic hypermutation was simulated by the insertion or deletion of nucleotides at junctions at a frequency based on randomly selected insertions and deletions in TCRβ clonotypes observed in adult healthy males (Zvyagin, I. V. et al. Proc Natl Acad Sci USA 111, 5980-5 (2014)). Following this procedure, we produced 15 artificial TCRβ clonotypes.

[0264] In another example, we generated a TCRγ locus on an artificial chromosome and modelled the VJ recombination to produce a suite of artificial TCRγ clonotypes. We firstly retrieved 10 Vγ segments, 5 Jγ segments and 2 Cγ segments and flanking intronic sequence from human genome (hg19). Each segment or intronic sequence was separately shuffled to remove homology to known natural sequences with the exception of sequences complementary to primer sequences used in the BIOMED-2 study (van Dongen, Langerak et al. 2003). Shuffled sequences and flanking intronic sequences were re-assembled to form an artificial TCRγ loci, as illustrated in FIG. 12. We next modelled the diversification processes of VγJγ somatic recombination that occurs during T-cell differentiation by randomly selecting and joining artificial Vγ segment and a Jγ segment to generate a range of TCRγ clonotypes. For example, we joined Vγ4 segment to Jγ1 segment to form a Vγ4Jγ1 clone (SEQ ID NO: 203). Following this procedure, we generated 15 artificial TCRG VγJγ clones (SEQ ID NOs: 203-219).

### Example 11

[0265] One example of an RNA standard sequence that represents the R_1_2_R gene in the artificial chromosome was performed. The R_1_2R gene locus was incorporated into the artificial chromosome using methods described in Example 2. The 13-exon sequences of the R_1_2_R gene was then joined together to form a continuous 1,310 nt sequence (SEQ ID NO: 3), whilst the intervening 12 intronic sequences were removed, as illustrated in FIG. 3. An additional ˜100 nucleotide poly-adenine tract was added to the 3′ end of the R_1_2_R mRNA sequence. The performance of RNA standards representing R_1_2_R standard using simulated sequenced reads was assessed. The Sherman software was used to simulate 1,000 paired-end 125-nt reads from the R_1_2_R sequence (SEQ ID NO: 3). We then aligned simulated reads to the artificial chromosome using the Tophat2 software (Kim, Pertea et al. 2013) with the following parameters:
[0266] >tophat2 cht_index simulated_reads.R1.fq simulated_reads.R1.fq

[0267] We found that all 1,000 reads aligned uniquely and correctly to the R_1_2_R gene. We found that simulated reads were correctly split and aligned across all 12 introns and 13, confirming the utility of the R_1_2_R standard.

### Example 12

[0268] One example of an RNA standard that represents an alternatively spliced mRNA isoform of the artificial R_12 gene was performed. The R_1_2_V sequence comprises an alternatively spliced isoform to the R_1_2_R sequence included in the artificial chromosome, and described in Example 11 above. The R_1_2_V isoform sequence comprises the 12 exons that form a contiguous 1,310 nt sequence (SEQ ID NO: 4), whilst the intervening 11 intronic sequences are removed. Note that the R_1_2_V standard sequence has 11 exons in common with the alternative isoform R_1_2_R standard, as illustrated in FIG. 3. However, it is missing an exon (4) and contains and additional two exons (5 and 6). Therefore, comparing the R_1_2_R and R_1_2_V RNA standards models the exclusion of exon 4 and inclusion of exon 5 and 6 by alternative splicing of the R_1_2 artificial gene.

### Example 13

[0269] One example of the manufacture of an RNA standard was performed in order to produce an RNA standard representing the mature mRNA sequence of the R_1_2_R gene. The R_1_2_R sequence (SEQ ID NO: 3) was first synthesized as a DNA molecule using a commercially available service (ThermoFisher GeneArt). The sequence was inserted into a pMA expression plasmid in the following order of elements: (i) a SP6 promoter (ii) R_1_2R gene sequence (iii) ˜50 nucleotide poly-adenine sequence and (iv) EcoR1 restriction site, as illustrated in FIG. 14. The plasmid was transformed and cultured with E. coli. The plasmid was purified using QIAprep Spin Midiprep (Cat #12945). Plasmid clones were Sanger sequenced to confirm the accuracy, insertion and orientation of the above sequence elements. The plasmid was then linearized by digestion with EcoR1 restriction endonuclease. Next, the plasmid was used as a template for an in vitro RNA synthesis reaction to generate a synthesized RNA polynucleotide standard that was then purified with a QIAquick column (QIAGEN). An aliquot of RNAstandards was analyzed using BioAnalyzer RNA Chip (Agilent) to confirm the expected full-length transcription and concentration. The purified RNA standard was then diluted to a required concentration.

### Example 14

[0270] One example method to produce different mixtures of multiple RNA standards was performed. We firstly manufactured RNA standards representing the 30 genes encoded in the artificial chromosome as described in Example 11 and 13 above. We divided 30 RNA standards into 10 groups (with each group consisted of 3 RNA standards) as indicated in Table 1. We performed a 3-fold serial titration between the 10 groups, covering a 10⁶-fold range in abundance between lowest and highest group. The 30 RNA standards at different relative abundance were then combined to form a mixture. Therefore, the mixture comprises 30 different RNA standards at a sequential range of different concentrations that comprise a quantitative scale or ladder of RNA abundance. This collection of RNA standards was called Mixture A.

[0271] We next assembled the same 30 RNA Standards with a different range of abundances to form a different mixture we call Mixture B, as indicated in Table 1. The abundance of the RNA standards in Mixture B is such that a pairwise comparison between the abundance of RNA standards indicates 0, 2-fold or 4-fold increases or decreases in the abundance of RNA standards between Mixture A and Mixture B. This differential change in RNA standard abundance is similar to a natural gene population, and can be used to emulate changes in gene expression.

### Example 15

[0272] One example method to produce different mixtures of multiple alternatively spliced RNA standards was performed. We firstly manufactured 60 RNA standards (SEQ ID NOs: 1-62) using methods described in Example 13. RNA standards were organised as pairs comprising two alternative isoforms that share and differ in exon sequence content to each other, as described in Example 12 above.

[0273] We combined the 30 pairs of RNA standards into two alternative 3-fold serial dilutions to form Mixture A and B, such that pairwise comparison of abundance between alternative isoform RNA standards corresponded to a 1-, 2- and 3-fold change (indicated in Table 1). For example, we added R_1_2_R at 15,000 attomoles/ul and R_1_2_V at 5,000 attomoles/ul in Mixture A, and we added R_1_2_R at 1,250 attomoles/ul and R_1_2_V at 3,750 attomoles/ul in Mixture B. This corresponds to a 4-fold change in R_12 gene expression between Mixture A and B, and also a 3-fold change in the relative concentration between individual R_1_2_R and R_1_2_V isoforms, thereby emulating the alternative splicing of the R_12 gene. Differences in isoform abundance between mixtures can be compared to the alternative splicing of natural gene populations.

### Example 16

[0274] One example of RNA standards to represent a fusion gene was performed as follows. RNA standards were the manufactured to match the (i) B1 gene sequence (SEQ ID NO: 136) (ii) A1 gene sequence (SEQ ID NO: 135) and (iii) B1fA1 gene matching B1 exons 1 to 13 sequence and A1 exons 2 to 11 sequence (SEQ ID NO: 137). RNA standards were manufactured using methods previously described in Example 13.

### Example 17

[0275] One example of the manufacture of a DNA standard was performed in order to represent the artificial chromosome sequence between 6,974,486-6,975,593 nucleotides. The 1,122 nt DNA standard sequence (SEQ ID NO: 63) and two flanking Sap1 restriction sites (GCTCTTC) was first synthesized into a DNA molecule with commercially available service (ThermoFisher GeneArt). The sequence was then cloned into a high copy plasmid (pMA), as illustrated in FIG. 14. Each plasmid is grown in E. coli culture and prepared using QIAprep Spin Midiprep (Cat #12945). DNA plasmids are purified using QIAquick column (QIAGEN) and diluted to a standard concentration to comprise stock. Plasmid clones are Sanger-sequenced to confirm the correct sequence and insertion into plasmid. The stock plasmid was used as a template for either DNA standard synthesis by PCR (using primers pairs at the termini of the D_1_1_R sequence are used to amplify the DNA standard) or restriction digest (Sap1 restriction endonuclease cleaves 5/6 nt downstream to the flanking Sap1 site and can be used to excise the D_1_1_R standard DNA molecule without leaving addition nucleotides at terminus after cleavage). Following synthesis, an aliquot of the D_1_1_R standard is analyzed on an Agilent 21000 Bioanalyser to confirm the expected full-length size and concentration of the standard. Purified DNA standard is then diluted to required concentration.

### Example 18

[0276] One example method to produce different mixtures of multiple DNA standards was performed. We manufactured 30 DNA standards matching the artificial chromosome sequence, using the methods described in Example 17 above. The DNA standards were divided into 10 groups, each consisting of 3 DNA standards. We assembled a 3-fold serial dilution for each group (ie. three DNA standards have the same concentration), thereby covering a 10⁶-fold range in concentration between lowest and highest group of DNA standards (indicated in Table 5). The combination of DNA standards across this range of concentrations is termed Mixture A. This mixture thereby provides a quantitative scale or ladder of DNA abundance. We next assembled the same 30 DNA Standards at a different range of concentrations to form an alternative Mixture B, as indicated in Table 5. The abundance of each DNA standards in Mixture B is such that a pairwise comparison between the abundance of DNA standards indicates 0, 2-fold or 4-fold increases or decreases in the abundance of DNA standards between Mixture A and Mixture B. This change in DNA standard abundance between mixtures is similar to a natural DNA sequences and comprises a quantitative scale or ladder by which to measure fold changes in DNA abundance.

### Example 19

[0277] One example method of joining multiple DNA standards to produce a single, larger or ‘conjoined’ DNA standard was performed. A conjoined DNA standard is comprised of multiple individual DNA standards produced using methods described in Example 17 above. For example, a conjoined DNA standard A is comprised of 1 copy D_1_1_R; 2 copies D12_R; 3 copies of D_1_3R, 4 copies of D_1_4R; 5 copies of D_1_5_R; 6 copies of D_1_6_R. Also note that by varying the copy number between 1 (D_1_1R) and 6 (D16_R) corresponds to a 6-fold increase in abundance between individual D_1_1_R and D_1_6_R standards, as illustrated in FIG. 16. We organised 15 conjoined DNA standards (A-O) assembled from total 90 individual DNA standards using this approach, as indicated in Table 7. Therefore, each conjoined DNA standard comprises 6 individual DNA standards at 1- to 6-fold relative copy number.

[0278] Individual DNA standards were assembled into conjoined DNA standards at different copy numbers (1 copy D_1_1_R; 2 copies D_1_2_R; 3 copies of D_1_3_R) as follows. Individual DNA standards were first cloned into a pUC19 vector. PCR amplification was performed using oligonucleotide primers with a 20-bp overlap at the junctions regions. Resultant PCR amplicons were ligated together using the Gibson Assembly Master Mix (New England BioLabs, Ipswich, MA) according to manufacturer's instructions. Briefly, a 6-fragment Gibson assembly was set up with 0.062 pmol of vector fragment, 0.187 pmol of five of the insert fragments and 10 ul of Gibson Assembly Master Mix (2×) to a final volume of 20 ul. The final Gibson assembly was incubated at 50° C. for 2 hrs. Following incubation, samples were stored at −20° C. for subsequent transformation and plasmid purification. Sanger-sequencing was used to confirm conjoined DNA standard insert sequence.

[0279] Conjoined DNA standards are titrated at increasing relative concentrations and combined to produce a Mixture C which encompasses a 15-fold increase in abundance, as indicated in Table 7.

### Example 20

[0280] One example of DNA standards that represent genetic variation between artificial chromosomes was performed. Genetic variation can be incorporated between artificial chromosomes, as previously described in Example 5. We manufactured 32 pairs of DNA standards (SEQ ID NOs: 63-134) that match regions of the artificial chromosome sequences of equal length (1000 nt), by the methods described in Example 17 above. Each pair comprises two DNA standards that match either ‘reference’ chromosomes (denoted _R) or variant artificial chromosomes (denoted V). For example, we produced a DNA standard pairs; one DNA standard matching the variant allele (termed D_1_1_V; SEQ ID NO: 64) and the other DNA standard matching the reference D_1_1_R standard (SEQ ID NO: 63) described in Example 20 above. The D_1_1_V standard sequence differs from the D_1_1_R standard sequence at 7 sites comprising 4 SNPs, a 12 nt deletion, a 6 nt insertion and a 33 nt deletion, as illustrated in FIG. 6. Where possible, 200 nt sequence flanking upstream and downstream to sites of variation was also in the DNA sequence to minimize the impact of sequencing edge effects. In total, 30 DNA standards pairs contain 252SNPS, insertions or deletions less than 50 nt (between 5-8 SNPS, insertions or deletions per DNA standard) were manufactured using the methods described in as described in Example 17 above.

### Example 21

[0281] One example method to produce different mixtures of DNA standards representing genetic variation. We can represent different polyploid genotypes by varying the relative abundance of DNA standard pairs that represent genetic variation, as described in Example 20. First the 30 DNA standard pairs are added at different abundances to form Mixture A, as indicated in Table 5, such that a pairwise comparison between DNA standard pairs indicates an total variant, equal, 3-fold, 9-fold, and 30-fold change in relative abundance between variant and reference DNA standards. This varying relative abundance between variant and reference DNA standards enables modelling of homozygous, heterozygous, and heterogeneous variation in a polyploid genome. For example, equal concentrations of DNA standards representing the reference and variant artificial chromosomes would represent a heterozygous genotype in a diploid organism such as human. The different relative concentration of DNA standards can establish a scale or ladder for measuring quantitative differences. We next assembled the same 30 DNA Standards pairs with a different range of abundances to form a different mixture we call Mixture B, as indicated in Table 5. The abundance of the DNA standards in Mixture B is such that a pairwise comparison between the relative abundance of reference and variant DNA standards indicates a range of fold-changes in the abundance of genetic variation between Mixture A and Mixture B. This differential change in the variant abundance is similar to changing allele frequencies between DNA samples.

### Example 22

[0282] One example of DNA standards to represent specific disease-associated genetic variation was performed. We produced two DNA standards corresponding to the reference and variant artificial chromosomes previously described in Example 6. Therefore, the reference DNA standard matched the reference sequence (T for Q139fs and T for V600E; SEQ ID NO: 138) and the variant DNA standard matched disease-associated genetic variation (TG for Q139fs and A for V600E; SEQ ID NO: 139). DNA standards were manufactured as previously described in Example 17.

[0283] DNA standards were combined with equal abundance to thereby emulate a heterozygous genotype carrying single TP53 Q136fs and BRAF V600E mutation and single wildtype alleles. We generated a serial dilution of variant DNA standards by 10-fold serial dilution in relation to the reference DNA standards as described in the Example 21 above. This can emulate a heterogeneous allele frequency where an increasingly small sub-population of DNA sample harbors a variant allele.

[0284] We performed next-generation sequencing (Illumina DNA sequencing machine sold under the name HISEQ™ 4000) on libraries containing different mixtures of reference and variant (containing mutations) DNA standards. We then analysed sequenced reads as follows: 1. We aligned sequenced reads to the human genome using BWA; 2. We processed the alignment using Picard tools; 3. We identified variants using the Genome Analysis Tool Kit (GATK). We identified both mutations (results taken from example output .vcf file from heterozygous mixture):

### p53 Frameshift Mutation

[0285] B5_R 300. T TG 962.73.\
[0286] AC=1;AF=0.500;AN=2;BaseQRankSum=1.780;ClippingRankSum=0.008;\
[0287] DP=60;FS=2.250;MLEAC=1;MLEAF=0.500;MQ=60.00;MQ0=0;\
[0288] MQRankSum=0.472;QD=16.05;ReadPosRankSum=−0.008;SOR=0.430 \
[0289] GT:AD:DP:GQ:PL 0/1:24,32:56:99:1000,0,677 (GT 0/1 indicating a heterozygous allele, the 0 being the reference allele and the 1 being the variant allele)

### BRAF V600E Mutation

[0290] B5_R 602. T A 130.77.\
[0291] AC=1;AF=0.500;AN=2;BaseQRankSum=0.306;ClippingRankSum=0.184;\
[0292] DP=15;FS=0.000;MLEAC=1;MLEAF=0.500;MQ=60.00;MQ0=0;\
[0293] MQRankSum=−0.429;QD=8.72;ReadPosRankSum=0.184;SOR=1.022 \
[0294] GT:AD:DP:GQ:PL 0/1:10,5:15:99:159,0,364

[0295] This example demonstrates the identification of clinically-important mutations represented on synthetic DNA standards at different homozygous, heterozygous and lower mutant allele frequencies. This provides an example whereby the mixture of the standards has been used to represent a heterozygous allele in a diploid human genome. The mutation modelled here (the BRAF V600E mutation) is of significant clinical relevance, demonstrating the value of the present calibration methods to the field of clinical diagnostics.

### Example 23

[0296] One example of DNA standards to represent large-scale genetic variation was performed. We manufactured DNA standards overlapping 12 examples of structural variation previously incorporated into the artificial chromosome, as described in Example 7. For each DNA standard, at least 600 nt of upstream and downstream flanking sequence was included to prevent end-effects that may impact sequencing and assembly. DNA standards pairs are manufactured as previously described in Example 17, and can be combined at different relative abundance to from a mixture that models different genotypes using the method described in Example 21.

### Example 23.1

[0297] One example of DNA standards to represent copy-number variation was performed. We produced six DNA standards (SEQ ID NO: 167-172) overlapping the artificial D4Z4 repeat array incorporated into artificial chromosomes in Example 7 above. Each DNA standards is a total 1,600 nt in length and comprises (i) a single D4Z4 repeat copy approximately 800 nt long (ii) 400 nt upstream sequence matching half repeat copy (iii) 400 nt downstream sequence matching half repeat copy, as illustrated in FIG. 33. To distinguish between each DNA standard, we included one of six ‘barcode’ nucleotide sequences (AGCTA, CGATC, CACTG, TCAGC, TAGAC, and GCAGT) into the DNA sequence. Note that each sequence is only present on one DNA standard, and not on the other 5 DNA standards. Barcode nucleotides have an intervening distance of 40 nt within the DNA standard sequence, so that each 100 nt window will always contain at least 2 instances of the barcode sequences, as illustrated in FIG. 17.

[0298] Each DNA standard was manufactured using the method described in Example 17, and DNA standards were titrated at the following relative concentrations; 10-fold, 13-fold, 50-fold and 150-fold as illustrated in FIG. 33. This encompasses the majority of observed D4Z4 copy number in human subjects(Schaap, Lemmers et al. 2013), from 10 copies exhibited by 95% of FSMD patients, to more than 100 copies for unaffected individuals(van der Maarel and Frants 2005). This process produced a mixture of DNA standards that represent different copy-numbers for a repetitive DNA sequence.

### Example 24

[0299] One example of DNA standards to represent microbe genome communities was performed. We produced 12 DNA standards (SEQ ID NO: 149-160) that match selected sequences within the artificial microbe genomes assembled in Example 9. Microbe genome sequences were selected such that the length and GC % of the DNA standards is proportional to the length and GC % of the artificial microbe genome, and therefore representative. This is indicated in Table 9 and illustrated in FIG. 10. For example, the artificial ‘Enterococcus faecal-like’ genome is 3.2 Mb and has an average 38% GC content. By comparison the representative DNA standard MG 1 (SEQ ID NO: 149) matching the ‘E. faecalis-like’ genome has a 2.2 kb length (6.875% of the full genome length) and 38% GC content, thereby proportionately representing the length and GC content of the ‘E. faecalis-like’ genome. DNA standards were manufactured as described previously in Example 17. The 12 DNA standards were organised into 4 groups, with each group combined at a 10-fold serial dilution of concentrations to form a mixture that that encompasses a 10⁴ fold-range in concentration.

### Example 25

[0300] One example of DNA standards to represent mammalian immunoglobulin sequence diversity was performed. We produced 15 DNA standards of 750 nt length that matched the artificial TCRβ VDJ clonotypes sequences, produced using methods described in Example 10. DNA standards overlap the sequences complementary the BIOMED-2 primers, as well as the intervening V, J and D segments, as illustrated in FIG. 13. DNA standards were manufactured as previously described in Example 17. DNA standards are organised into 5 groups (i.e., 3 standards per group), with each group combined at a 10-fold serial dilution of concentrations to form a mixture that that encompasses a 10⁵ fold-range in concentrations. This dynamic range spans human clonotype distribution profiles observed in healthy samples(Zvyagin, Pogorelyy et al. 2014) and also disease conditions such as minimal residual disease(Logan, Gao et al. 2011).

[0301] In another example, DNA standards were produced to represent the artificial TCRG VJ clonotype sequences described in Example 10. We produced 15 DNA standards (SEQ ID NOS: 186-202) of 750 nt length that matched the artificial TCRG VγJγ clonotype sequences produced in Example 10. DNA standards overlap the sequences complementary to the BIOMED-2 primers, as well as the intervening V and J segments, as illustrated in FIG. 12. DNA standards were manufactured as previously described in Example 17, and combined to form a mixture as described above.

### Example 26

[0302] One example method of adding RNA standards to natural RNA sample for sequencing was performed. Firstly, K562 cells were cultured according to Coriell Cell Repositories growth protocols and standards. Briefly, K562 cells were cultured in RPMI 1640 medium (Gibco®) supplemented with 10% fetal bovine serum (FBS) at 37° C. under 5% CO2. Total RNA was extracted from K562 cells using a monophasic solution of phenol and guanidium isothiocyanate sold under the name TRIZOL™ (Invitrogen) according to the manufacturer's instruction. DNase treatment was subsequently performed on each sample with TURBO DNase (Life Technologies) followed by a clean-up with the RNA Clean and Concentrator Kit (Zymo Research). Total RNA was run on a BioAnalyzer to check for integrity and to determine the concentration. Only RNA with a RNA integrity number (RIN)>9.5 were used for library preparation.

[0303] RNA Standards were combined as Mixture A as previously described in Example 14 and Table 1. RNA Mixture A was then added to ˜1% total volume with K562 total RNA (as measured with spectrophotometer sold under the name NANODROP™, ThermoScientific). The RNA sample prep kit sold under the name TRUSEQ™ Stranded Total RNA Sample Prep Kit (Illumina) was used to prepare RNA libraries according to manufacturer's instructions. Prepared libraries were quantified on Qubit (Invitrogen) and verified on Agilent 2100 Bioanalyzer (Agilent Technologies) before samples were pooled for sequencing. Sequencing is performed using a DNA sequencing machine sold under the name of HISEQ™ 2500 instrument (Illumina) with 125 nt paired-end sequence reads.

### Example 27

[0304] One example method of assessing the alignment and assembly of RNA standards was performed. We produced RNA standards matching 30 genes comprising 2 alternative isoforms (60 RNA standards in total) using methods as described in Example 11 and 13 above. We diluted RNA standards to equal abundance and combined in equal proportion to form equal parts of Mixture C. The RNA sample prep kit sold under the name TRUSEQ™ Stranded Total RNA Sample Prep Kit (Illumina) was then used to prepare libraries directly from the RNA standards Mixture C according to manufacturer's instructions. Prepared libraries were quantified on Qubit (Invitrogen) and verified on Agilent 2100 Bioanalyzer (Agilent Technologies) before samples were sequenced with 125 nt paired-end reads on a DNA sequencing machine sold under the name of HISEQ™ 2500 (Illumina) instrument. The sequence read (.fastq) file was processed using methods described in Example 28. We then aligned sequence reads to the artificial chromosome (chrT) using Tophat2 with the following parameters:
[0305] >tophat2 chrT_index MixtureC.R1.fq MixtureC.R2.fq

[0306] From the resultant alignment (.bam) file, we determined the alignment statistics (for both total and split alignments) using methods described in Example 28. Notably, all RNA standards were of sufficient abundance such that they achieved full sequence read fold coverage, and this therefore enables an assessment of alignment when sequence fold-coverage is non-limiting. These results are summarised in Table 2. Specifically, we determine 98% sensitivity for total read alignments, and 0.99% sensitivity for spliced read alignments from RNA standards Mixture C. Furthermore, we assembled all gene structures with the exception of 18 introns and 16 exons missed, thereby confirming the performance of RNA standards matching gene loci (and isoforms) encoded on the artificial chromosome.

[0307] For comparison, we also simulated sequenced reads that would be generated from sequencing the same 60 RNA standards described above. Comparison of simulated reads to those experimentally-derived reads produced from the RNA standards as described above can distinguish the impact of variables due to alignment and assembly (that will influence both simulated and experimentally-derived reads) from variables due to library preparation and sequencing (that will influence only experimentally-derived reads, and not simulated reads).

[0308] We used RNASeqReadSimulator (alumni.cs.ucr.edu/˜liw/rnaseqreadsimulator.html) software to simulate 125-nt paired-end reads generated from RNA standards that incorporate a 1% error rate that has been typically reported for Illumina sequencing technology (Bolotin, Mamedov et al. 2012). This generates a .fastq file as per standard sequencing on the DNA sequencing machine sold under the name HISEQ™ 2500 instrument. Sequence read file was processed and aligned as above and alignment statistics (for both total and split alignments) were determined using methods described in Example 28. Results are summarised in Table 2. Specifically, we observe a 98% sensitivity for alignment, and 99% sensitivity for spliced alignments, while missing 6 introns and 8 exons from final assembly.

[0309] Comparison of alignment and assembly outcomes for gene loci with simulated and experimentally-derived sequenced reads validate the use of RNA standards in sequencing experiments. Notably, simulated reads sufficiently recapitulate the performance of experimentally-derived sequenced reads for the alignment and assembly of RNA standards, indicating their utility in designing, modelling and analysing RNA standards matching transcribed features of artificial chromosomes.

### Example 28

[0310] One example method of aligning reads constituting RNA standards and natural RNA sample library to artificial chromosome and natural reference genome was performed. Sequence files (.fastq) produced using method described in Example 26 were subject to de-multiplexing. Low-quality reads and sequences or adaptor contaminant sequences were removed from sequence files using trim_galore according to manufacturer's instructions:
[0311] (www.bioinformatics.babraham.ac.uk/projects/trim_galore/).

[0312] The human genome (hg19) sequence was concatenated with the artificial chromosome (chrT) sequence to form a single file (.fasta). We then used bowtie-build to generate an index file (hg19_chrT_index.*) from the combined sequence file according to manufacturer's instructions (Langmead and Salzberg 2012). We next aligned sequenced reads (.fastq) to the index file (hg19_chrT_index.*) using Tophat2 (Kim, Pertea et al. 2013) with the following parameters:
[0313] >tophat2 hg19_chrT_index./K562.R1.fq./K562.R2.fq

[0314] This approach does not incorporate previous gene annotations to guide alignment, and is often required for discovery of new genes and de novo assembly of transcripts. We next assessed the alignments of sequenced reads to the artificial chromosome and natural genome according to a number of metrics described below and summarised in Table 2. Reads to Genome/Artificial Chromosome is determined by the number of reads that align to the artificial chromosome (Reads To ChrT) and the human genome (Reads to Hg19). For K562, we aligned 1,091,683 reads to the artificial chromosome and 65,778,796 reads to the human genome sequence.

[0315] Fraction Dilution is calculated from the fraction of reads aligning to the artificial chromosome relative to the genome indicates the dilution of the standards relative to the sample library. For K562 sample, 1.63% of library aligns to the artificial chromosome, indicating a 61-fold dilution factor.

[0316] Alignment Sensitivity is defined as the number of artificial gene bases of the gene loci encoded on the artificial chromosome with alignments (true positive) divided by the total number of artificial gene bases. For K562 sample 1, we observe an alignment sensitivity of 0.81

[0317] Alignment Specificity is defined as the number of artificial gene bases with alignments divided by the total number of bases with alignments. For K562 sample 1, we observe an alignment specificity of 0.83.

[0318] Spliced Alignment Sensitivity is defined as the number of artificial gene introns with correct split alignments divided by the total number of artificial gene introns. For K562 samples, the alignment sensitivity of 0.86, and is illustrated in FIG. 22A.

[0319] Spliced Alignment Specificity is defined as the number of artificial gene introns matching split alignments divided by the number unique split alignments. For K562 samples, we observe an alignment specificity of 0.85.

[0320] Detection Limit corresponds to the highest abundance RNA standard that is not reliably detected within the sequenced library and is without overlapping alignments, and is illustrated in FIG. 24D. We determine a lower limit of detection at 0.005 attamoles/ul (the highest abundance RNA standard R_8_2 (SEQ ID NOs: 47, 48) not detected multiplied by dilution factor). Isoforms within the corresponding K562 RNA sample that are below this concentration may not be represented or detected within the sequencing library, and library sequencing has not proceeded to total saturation.

### Example 29

[0321] One example method of assembling reads from RNA standards into artificial genes was performed. Alignment files (.bam) generated by method described in from Example 28 were assembled into full-length transcript structures using Cufflink2 (Trapnell, Williams et al. 2010) according to default parameters:
[0322] >cufflinks K562_1_mixA.bam

[0323] We assembled 108 transcript structures on the artificial chromosome, with an example illustrated in FIG. 23. Note that this is higher than the number of RNA standards (60) due to the partial assembly of some RNA standards as multiple fragmented structures.

[0324] To assess assembly performance, we used Cuffcompare (Trapnell, Williams et al. 2010) according to default parameters to compare assembled transcripts relative to known transcript annotations on the artificial chromosome. We assessed transcript assembly according to the sensitivity and specificity of assembly relative to artificial gene structure at all levels (nucleotide, exon, intron, transcript, gene) and the fraction of artificial exons, introns and genes missing from the assembly. Further detail on the measures of sensitivity and specificity in relation to gene structures are described previously (Burset and Guigo 1996). The results for the assembly of RNA standards when combined with the K562 RNA sample in the present example are summarized, in Table 2. Notably, these measures based on gene assembly on artificial chromosome inform an assessment of matched de novo assembly of transcripts in accompanying K562 RNA sample.

[0325] Failure to assemble isoforms correctly can result from insufficient sequence coverage of RNA standards with low abundance. The most abundant RNA standard that fails to assemble correctly thereby indicates a lower limit of transcript assembly. This is illustrated in FIG. 22A and FIG. 22B by plotting the known concentration of each isoform relative to the sensitivity with which the exons, introns and full isoform structure are assembled. Transcripts from the accompanying K562 RNA sample that are present below this concentration will be expected to be poorly or only partially assembled.

### Example 30

[0326] One example method of quantifying RNA standards abundance was performed. We first added RNA standards, as previously prepared as Mixture A in Example 15, to three biological replicate K562 RNA samples for library preparation and sequencing using methods described in Example 26.

[0327] We first aligned sequenced reads (.fastq) to the index file (hg19_chrT_index.*) using Tophat2 (Kim, Pertea et al. 2013) with the following parameters:
[0328] >tophat2 -G annotations.gtf hg19_chrT_index./K562.R1.fq./K562.R2.fq

[0329] This approach uses gene annotations to guide alignment. The annotation file (annotations.gtf) comprises annotations of gene loci on the artificial chromosome, and natural genes annotations from GENCODE v19 (Harrow, Frankish et al. 2012) for the human genome. Alignment files (.bam) were quantified against RNA standard and human gene annotations using Cufflink2 (Trapnell, Williams et al. 2010) according to default parameters:
[0330] >cufflinks -G annotations.gtf K562_1_mixA.bam

[0331] Abundance can be quantified at two levels; abundance for each artificial gene (i.e., both DNA standard pair combined) and each isoform (i.e., each DNA standard isoform) was measured. To illustrate the quantification of RNA standards in FIG. 24A, we plotted the measured gene abundance (in RPKM) relative to the known gene concentration (in attamoles/ul) of each artificial gene. The quantitative accuracy can be measured by correlation (Pearson's r) between the observed abundance of RNAstandards (as measured by NG sequencing) to their expected abundance (that corresponds their known concentration when combined into Mixture A). For this example (RNA standards Mixture A combined with 3 replicate K562 RNA samples), the correlation is 0.95. The slope, illustrated in FIG. 24A measures proportionality of increase (determined from non-linear regression fitting with a straight line and 1/Y² weighting). This indicates the linear proportionality of observed compared to expected abundance across the dynamic range of the RNA standards. For this example, the slope is 0.91. These results are summarised in Table 2.

[0332] The accuracy with which an RNA standard is quantified is dependent on sequencing coverage, and quantification of low abundance RNA standards with low sequencing coverage is more variable than high abundance RNA standards. To illustrate this, we plotted the coefficient of variation (COV %) in quantitative measurement for each RNA Standard relative to the known concentration of each RNA standard in FIG. 22C. This indicates that the RNA standards at 0.153 attamoles/ul have variation of high variation 97.07 (CV %) while genes at 1,250 attamoles/ul exhibit a low variation of 3.24 (CV %). This demonstrates the use of RNA standards to assess the confidence with which gene abundance is measured.

[0333] We can use RNA standards to convert the abundance of natural genes (in the accompanying RNA sample) that is measured by NG sequencing in reads per kilobase per million (RPKM) into concentration in molar units (attamoles/ul), as illustrated in FIG. 24A. For example, in the accompanying K562 RNA sample we measure the expression of the breakpoint cluster region gene (BCR) to be at 20.9063 RPKM. This corresponds to a concentration of 0.019 attamoles/ul by comparison to similarly abundant RNA standards.

### Example 31

[0334] One example method using RNA standards to measure alternative splicing was performed. The accurate quantification of an individual isoforms is complicated by varying levels of sequence shared with other alternatively spliced isoforms from the same gene loci. Therefore, to assess the accuracy of isoform quantification, we plotted the measured isoform abundance (in RPKM) relative to the known isoform abundance (in attamoles/ul) of RNA standards in Mixture A (prepared in Example 15), as illustrated in FIG. 24D. We next determined the correlation of 0.93 (Pearson's r) and slope of 0.86 for isoform RNA standards added with the K562 RNA sample, thereby providing an assessment of isoform quantification. These results are summarised in Table 2.

[0335] We next measured the relative abundance between the multiple individual isoform RNA standards that are generated from a single shared artificial gene loci in a process emulating alternative splicing. We plotted the observed relative abundance of paired isoforms compared to the known relative abundance of paired isoforms, as illustrated in FIG. 25A, to indicate of the quantitative accuracy with which alternative splicing events are measured. For this sample, we observe a correlation of 0.76 (Pearson's r) and slope of 0.84 between RNA isoform pairs in Mixture A that were added to the K562 RNA sample. This assessment informs the analysis of alternatively splicing of natural genes in the accompanying K562 RNA sample.

### Example 32

[0336] One example method of using RNA standards to measure differences between multiple RNA samples was performed. Firstly, GM12878 cells were cultured according to Coriell Cell Repositories growth protocols and standards. Briefly, GM12878 were cultured in RPMI 1640 medium (Gibco) supplemented with 10% fetal bovine serum (FBS) at 37° C. under 5% CO2. RNA was extracted from GM12878 cells using a monophasic solution of phenol and guanidium isothiocyanate sold under the name TRIZOL™ (Invitrogen) according to the manufacturer's instruction. RNA Standards prepared as Mixture A and Mixture B as previously described in Example 14, and as indicated in Table 1. RNA Mixture A was added to K562 RNA samples and RNA Mixture B was added to GM12878 RNA samples to final volume of 1% of final sample (as measured by spectrophotometer sold under the name NANODROP™, ThermoScientific). Libraries were prepared, sequences as described above in Example 26. Sequenced read files (.fastq) for RNA standards Mixture B with accompanying GM12878 RNA sample were analysed with the artificial chromosome and reference human genome using the method described above in Examples 28-30. Results are summarised in Table 2 and illustrated in FIG. 24B,F.

[0337] We next compared differences in the abundance of RNA standards between Mixture A (with K562 cell samples) and Mixture B (with GM12878 cell samples). We plotted the observed fold change between Mixture A and B compare to the expected fold-change, as illustrated in FIG. 24C and indicated in Table 3. We observe a correlation of 0.70 (Pearson's r) and slope of 0.88 between expected and observed fold-change, indicating the accuracy with which differential RNA abundance is measured between accompanying RNA samples.

[0338] We next measured differences in the relative isoform abundance of RNA standards between samples. We plotted the observed versus expected fold change in isoform abundance between Mixture A and Mixture B as illustrated in FIGS. 24F and 25B. For this sample, the observed to expected isoform fold-change has a correlation of 0.73 (Pearson's r) and slope of 0.75 (summarised in Table 3), indicating the accuracy with which differential alternative splicing is measured between accompanying RNA samples.

[0339] Fold-changes in isoform abundance emulate quantitative alternative splicing events. We use the R_10_2 gene to illustrate in FIG. 25C how the standards can emulate fold-changes in alternative splicing. The R_10_2 gene comprises two different isoforms that result from the alternative splicing of the 5^{th} exon to generate a longer isoform (_R) or shorter version (_V). Coverage by simulated sequence reads, generated by methods previously described in Example 27, indicates that the R_10_2 isoforms can be faithfully assembled. Standards representing the R_10_2 genes were added to the Mixtures A and B such that the (i) gene expression decreases 5-fold and (ii) Isoform expression changes with a relative 3-fold increase of the R_10_2_V isoforms with concomitant 3-decrease in R_10_R isoform. This emulates 3-fold change in alternative splicing at exon 5 as illustrated in FIG. 25C. We next quantified the fold-change in R_10_2 isoform abundance between K562 cells with Mixture A and GM12878 cells with Mixture B, observing a 4-fold decrease in gene expression (which is an underestimation of 5-fold expected fold-change change in gene abundance) and a 3-fold change in relative isoform abundance, as illustrated in FIG. 25C. This example demonstrates how varying abundance of isoform RNA standards can emulate alternative splicing differences between RNA samples.

[0340] We can restrict and of the above analysis to specific subsets of RNA standards. For example, we can determine the accuracy of alternative splicing of RNAs standards above a user-defined threshold abundance limit of assembly at 4.8 attamoles/ul, as illustrated in FIG. 26B. Because this subset of RNA standards has higher sequence coverage than the average for all RNA standards, we observe more accurate measures (correlation, slope) of isoform quantification.

### Example 33

[0341] One example method of using RNA standards to calibrate differences between disease and normal RNA samples was performed. Total RNA samples from 3 normal human lung samples and 3 lung adenocarcinoma samples were purchased from Origene (Sample IDs: CR560142, CR559185, CR560128, CR560083, CR560135, CR561324; Rockville, MD). RNA standards Mixture A was added at 1% total volume to each lung adenocarcinoma samples and RNA Mixture B is added at 1% volume to each lung normal RNA, using methods previously described in Example 26. To enable a comparison with previous published ERCC RNA Spike-Ins(Consortium 2005), we also added ERCC Spike-In Mixture 1 to each lung adenocarcinoma sample and ERCC Spike-In Mixture 2 to each lung normal sample according to manufacturer's instructions (tools.lifetechnologies.com/content/sfs/manuals/cms_086340.pdf). Combined RNA samples were prepared as libraries for sequencing, and analysed using methods described in Example 28-30 above. Results are summarised in Table 2.

[0342] We next compared the performance of RNA standards described herein with ERCC Spike-In sequences. We determined the alignment and expression fold-change for the ERCC Spike-Ins according to manufacturer's instructions, and measured alignment specificity and sensitivity, fraction dilution, detection limit and dynamic range, and quantitive accuracy (correlation and slope) as previously described (in Example 28-30) for both RNA standards and ERCC Spike-Ins. The comparison between ERCC Spike-Ins and RNA standards is summarized in Table 2.

[0343] We plotted the expected relative to known abundance of both RNA standards and ERC C Spike-Ins in FIG. 26A,B. We also compare the fold-change between mixtures for both RNA standards and ERCC Spike-Ins as illustrated in FIG. 26C.

[0344] ERCC standards exhibit similar alignment sensitivity (0.84) compared to RNA standards (0.81) but higher specificity (0.99) compared to RNA standards. This higher specificity of ERCC alignments is a result of ERCC Spike-Ins comprising only a single RNA sequence. Unlike RNA standards descried herein, and endogenous human genes, ERCC Spike-Ins are not comprised of multiple exons and intron sequences, and it is therefore only possible to align non-split reads to ERCC Spike-In sequences.

[0345] We next quantified the expression of human genes causatively associated with cancer (as curated by the Wellcome Trust Sanger Cancer Census(Futreal, Coin et al. 2004)) within the normal lungs RNA samples or lung adenocarcinoma RNA samples. We concatenated the genome coordinates (from GENCODE v19 annotations (Harrow, Denoeud et al. 2006)) of 464 genes coordinates of genes on the artificial chromosomes to form a single annotation file (CancerGenes_RNAstandards.gtf). We then measured expression of cancer genes and RNA standards using Cuffdiff (Trapnell, Williams et al. 2010) with the following parameters:
[0346] >Cuffdiff -g CancerGenes_RNAstandards.gtf
[0347] LungCancer1.sam,LungCancer2.sam,LungCancer3.sam
[0348] LungNormal1.sam,LungNormal2.sam,LungNormal3. sam

[0349] We then performed a comparative analysis to assess the quantitative accuracy of differential gene expression and alternative splicing of RNA Standards in Mixture A (with Lung Normal) and Mixture B (Lung Adenocarcinoma) using methods previously described in Example 28-30. Results are summarized in Table 3.

[0350] We plotted the measured abundance of cancer genes relative to the measured abundance of RNAs standards to illustrate in FIG. 26D how the observed abundance (in RPKM) of the RNA standards can be used to infer the concentration (in attamoles/ul) of corresponding cancer genes.

[0351] To illustrate how RNA standards can inform the analysis of individual genes in the accompanying RNA samples, we considered expression of the mini-chromosome maintenance 2 (MCM2) gene. MCM2 is a marker of cell proliferation (Yang, Ramnath et al. 2006, Simon and Schwacha 2014) and enriched MCM2 expression has been previously reported in lung adenocarcinomas samples(Zhang, Gong et al. 2014). Therefore, it is important to accurately measure fold-changes in MCM2 expression between normal and matched tumor samples. MCM2 has a complex spliced structure (comprising 16 exons) and is therefore well modeled using the RNA standards. We observed MCM2 exhibits a mean expression of ˜63.0 RPKM in Lung Normal Samples, but is enriched 2.07-fold (to mean 170.1 RPKM) in Lung Adenocarcinoma Samples. By comparison to RNA standards, we determine MCM2 expression corresponds to a concentration of 19.53 attamoles/ul. Notably, RNA standards at a similar concentration (such as R_6_1 and R_6_2) are poorly assembly and quantified. This suggests the measurement of MCM2 expression between the accompanying Lung Normal and Lung Adenocarcinoma RNA sequencing should be interpreted cautiously.

[0352] The plot of measured RNA standard abundance illustrated in FIG. 26D suggests a limit of detection at ˜0.005615 attamoles/ul. We observe that 42.7% of cancer genes are above this limit of detection and are suitable for further analysis. Note that because this library has not been sequenced to saturation, additional cancer genes may be present at concentrations below this limit of detection, or undergo changes in gene expression that may not be accurately detected.

### Example 34

[0353] One example method of adding RNA standards to mouse RNA sample for sequencing was performed. We first obtained mouse liver tissue from a 4-month-old wild-type Swiss mouse. Total RNA was extracted from mouse liver sample using a monophasic solution of phenol and guanidium isothiocyanate sold under the name TRIZOL™ (Invitrogen) according to the manufacturer's instruction. DNase treatment was subsequently performed on each sample with TURBO DNase (Life Technologies) followed by a cleanup with the RNA Clean and Concentrator Kit (Zymo Research). Total RNA was run on a BioAnalyzer to check for integrity and to determine the concentration. Only RNA with a RNA integrity number (RIN)>9.5 was used for library preparation. RNA Standards, previously prepared as Mixture A in Example 15, was added to mouse liver RNA sample at 1% volume (as determined by spectrophotometer sold under the name NANODROP™, ThermoFischer). RNA samples were prepared and sequenced using methods described in Example 26.

[0354] We next concatenated the artificial chromosome (chrT) sequence with the mouse genome (mm10) sequence to form a single file (.fasta). We then generated an index file (mm10_chrT_index.*) from the combined sequence file using bowtie-build according to manufacturer's instructions (Langmead and Salzberg 2012). We next aligned sequenced reads (.fastq) to the index file (mm10_chrT_index.*) using Tophat2 (Kim, Pertea et al. 2013) with the following parameters:
[0355] >tophat2 mm10_chrT_index./MouseLiver.R1.fq./MouseLiver.R2.fq
   to provide an alignment file (.bam). Analysis of alignment, assembly and quantification of RNAs standards accompanying the Mouse liver sample was performed using methods previously described in Example 28-30. The results are summarized in Table 2 and illustrated in FIGS. 27 and 28. Notably, the analysis of RNA standards in Mixture A that were added with mouse liver RNA sample exhibited a similar sensitivity (0.56) and specificity (0.97) as to RNA standards used with human RNA sample, as indicated in Table 2. This confirms that the performance of RNA standards is not affected by addition to the mouse RNA sample, nor the concomitant alignment of sequenced reads to the mouse genome.

### Example 35

[0356] One example method of analysing sequenced reads from RNA standards with non-human genomes was performed. We determined whether RNA standards perform comparably well as described in the previous Example 28-30 and 34 when used with different natural genomes from a range of different organism clades. We first downloaded genome sequences for the following organisms: H. sapiens (hg19), M. musculus (mm10), C. elegans (ce10), D. melanogastor (dm3), A. thalianis (tair9) E. coli (eschColiK12) and M. kandleri (methKand1) and S. cerevisae (SacCer6). Each individual genome sequence was concatenated with the artificial chromosome sequence (chrT) to form a single sequence (.fasta) file. Bowtie2-build was then used to build indexes corresponding to the combined sequence files according to manufacturer's instructions.

[0357] We next aligned sequenced reads from the library prepared from RNA standards combined in equal concentration to form Mixture C as described in Example 27. Sequenced reads were aligned to each individual index comprising artificial chromosome with an organism genome (denoted by *) using the following parameters:
[0358] >tophat2 *_chrT_index MixtureC.R1.fq MixtureC.R2.fq
   where * corresponds to organism genome (e.g. Dm3,hg19 etc.)

[0359] For each resultant alignment (.bam), we determined the alignment statistics (for both total and split alignments) using methods described in Example 28 above. We observed that the number of reads aligning to the genome, and the specificity and sensitivity of total and spliced reads was largely invariant regardless of the accompanying genome. These results are summarised in Table 4 and indicate that RNAstandards perform comparably well regardless of accompanying genome and that RNA standards can be used in conjunction with RNA samples from a wide range of organisms.

### Example 36

[0360] One example method of using RNA standards to measure fusion gene expression was performed. We simulated read libraries using methods previously described in Example 27 for the RNA standards representing normal (A1 and B1) genes and fusion genes (B1fA1) resulting from the translocation of artificial chromosomes as described in Example 8. Read abundance is apportioned according to a 10-fold serial dilution of the fusion RNA standards relative to the two normal RNA standards (A1 and B1 gene) to encompass a 10⁴ fold range, as illustrated in FIG. 9B. This results in the representation of the fusion RNA standard with in a increasingly small proportion of reads. We concatenated the RNA standard sequence reads to a final concentration of 1% with the experimentally derived RNA sequencing libraries generated from K562, GM12878, Lung Normal and Lung Cancer RNA samples described in detail above. The produced a library file (.fastq) for further analysis.

[0361] We next aligned sequenced reads (.fastq) to the index file (hg19_chrT_index.*) using Tophat2-fusion (Kim, Pertea et al. 2013) with the following parameters:
[0362] >tophat2-fusion hg19_chrT_index./K562.R1.fq./K562.R2.fq
   to generate an alignment file (.bam) and fusion file (fusions.out) that indicated the number of reads (per million; RPM) overlapping the fusion intron generated by the translocation. We plotted the known concentration of each fusion RNA standard dilution relative to read coverage as illustrated in FIG. 9B. We assessed the quantitative accuracy of fusion gene RNA Standard is using the correlation (0.982) and slope (0.927), indicating a relatively high accuracy for quantifying fusion gene expression relative to normal genes. In addition, we also plotted the confidence ascribed to the identification of the fusion RNA standard compared to the relative abundance of the RNA fusion gene, as illustrated in FIG. 9C. This analysis indicates the accuracy, sensitivity and confidence with which fusion genes at corresponding coverage can be detected and quantified within the accompanying natural RNA sample.

[0363] The accompanying K562 RNA sample is heterozygous for the BCR-ABL gene fusion between chromosome 9 and 22(Grosveld, Verwoerd et al. 1986). We next used the RNA standards to inform the measurement of the relative abundance of endogenous BCR-ABL1 (p210) fusion gene in the K562 RNA sample. We titrated genome DNA from K562 cells with a 10-fold serial dilution against GM12878 genome DNA to emulate an increasingly small sub-population of cells (K562) harboring the BCR-ABL1 fusion gene against a wild-type cell (GM12878) background. We plotted read (per million) abundance of the BCR-ABL1 (p210) fusion gene at serial dilutions of K562 cell fractions, as illustrated in FIG. 9B. RNA standards corresponding to the abundance of the BCR-ABL1 (p210) fusion gene indicates a relative shallow limit of fusion gene detection sensitivity (corresponding to ˜1:10 dilution) that is insufficient to monitor minimal residual disease. Therefore, the use of RNA standards representing fusion genes enables us to assess the sensitivity and accuracy of detecting fusion genes in an RNA sequencing library, and may be useful in monitoring minimal residual disease(Mitterbauer, Nemeth et al. 1999).

### Example 37

[0364] One example method of adding DNA standards to a natural DNA sample for sequencing was performed. Human GM12878 cell line (Coriell Cell Repositories) were cultured in RPMI 1640 medium (Gibco®) supplemented with 10% fetal bovine serum (FBS) at 37° C. under 5% CO2. DNA was extracted from GM12878 using a monophasic solution of phenol and guanidium isothiocyanate sold under the name TRIZOL™ (Invitrogen) according to the manufacturer's instruction. The extracted DNA samples were treated with RNase A followed by a cleanup with Genomic DNA Clean & Concentrator kit (Zymo Research). Purified DNA was quantified on the spectrophotometer sold under the name NANODROP™ (Thermo Scientific). DNA standards were combined as Mixture A as previously described in Example 18 and Table 5. DNA Mixture A is then added to ˜1% total volume with GM12878 genome DNA (as measured with NanoDrop, ThermoScientific).

[0365] The RNA sample prep kit sold under the same TRUSEQ™ Stranded DNA Sample Prep Kit (Illumina) was used to prepare DNA libraries according to manufacturer's instructions. Prepared libraries were quantified on Qubit (Invitrogen) and verified on Agilent 2100 Bioanalyzer (Agilent Technologies) before samples were pooled for sequencing. Sequencing is performed using a DNA sequencing machine sold under the name HISEQ™ 2500 instrument (Illumina) with 125 nt paired-end sequence reads.

### Example 38

[0366] One example method of assessing the alignment and assembly of DNA standards was performed. We produced DNA standards matching 30 regions of the artificial chromosome with two alleles (reference and variant) using methods as described in Example 17 and 20 above. We diluted DNA standards standards to equal abundance and combined in equal proportion to form equal parts of Mixture C. The RNA sample prep kit sold under the name TRUSEQ™ Stranded DNA Sample Prep Kit (Illumina) was used to prepare DNA libraries according to manufacturer's instructions. Prepared libraries were quantified on Qubit (Invitrogen) and verified on Agilent 2100 Bioanalyzer (Agilent Technologies) before samples were sequenced as 125 nt paired-end reads with a DNA sequencing instrument sold under the name HISEQ™ 2500 instrument (Illumina). The sequence read (.fastq) file was processed and aligned using methods described in Example 39. We assessed alignment from the alignment (.bam) file using methods described in Example 39. Notably, all DNA standards were of sufficient abundance as to achieve full sequence fold-coverage. Alignment measurements where sequence fold-coverage is non-limiting are summarised in Table 6. Specifically, we determine 99% sensitivity and 97% specificity for read alignments, thereby validating the utility of DNA standards to represent regions of the artificial chromosome.

[0367] For comparison, we also simulated reads expected to be generated from the same DNA standards. Comparison of simulated reads to experimentally-derived reads produced above can distinguish the impact of variables due to alignment and assembly (that will influence both simulated and experimentally-derived reads) from variables due to sequencing (that will influence only experimentally-derived reads, and not simulated reads).

[0368] We used Sherman (www.bioinformatics.babraham.ac.uk/projects/sherman/) according to manufacturer's instructions to simulate 125 nt paired-end reads generated by DNA standards as a .fastq file as per sequencing on DNA sequencing machine sold under the name HISEQ™ instrumentation. Sequenced reads incorporate a 1% error rate that has been typically reported for Illumina sequencing technology (Bolotin, Mamedov et al. 2012). We aligned simulated sequence reads to the artificial chromosome (with using bwa with the identical parameters as above, and assessed alignments as described above. Results are summarised in Table 6. Specifically, we observe 99% sensitivity and 100% specificity for alignment of reads from DNA standards, thereby validating the utility of DNA standard matching sequences from the artificial chromosome. Notably, simulated reads sufficiently recapitulate the performance of experimentally-derived sequenced reads for the alignment and assembly of DNA standards, indicating their utility in designing, modelling and analysing DNA standards that match features of artificial chromosomes.

### Example 39

[0369] One example method of aligning reads constituting DNA standards and a natural DNA sample library to artificial chromosome and natural reference genome was performed. Sequence files (.fastq) produced using method in Example 37 were subject to de-multiplexing. Low-quality reads and sequences or adaptor contaminant sequences were removed from sequence files using trim_galore according to manufacturer's instruction
[0370] (www.bioinformatics.babraham.ac.uk/projects/trim_galore/).

[0371] The human genome (hg19) sequence was concatenated with the artificial chromosome (chrT) sequence to form a single file (.fasta). We then used bwa index according to manufacturer's instruction (Langmead and Salzberg 2012) to generate an index file (hg19_chrT_index.*) from the combined sequence file. We next aligned reads to the index file using bwa (Li and Durbin 2009):
[0372] >bwa mem -M hg19_chrt.bwa sequence.read1.fq sequence.read2.fa>alignments.sam
   to generate an alignment (.bam) file.

[0373] Sequencing errors can produce base-wise mismatches between read alignments and the artificial chromosome sequence. We can analyse of sequence errors alignments to assess sequencing quality. For example, the Sequencing Error Rate indicates the mean number of sequencing errors per 100 nt sequenced. In this example whereby DNA standards are added with the GM12878 DNA sample, we determine that 0.67% of reads contain an erroneous mismatches, as illustrated in FIG. 29A. The Sequencing Error Distribution also describes distribution of sequence errors across to the read, as illustrated in FIG. 29B.

[0374] We next assessed the alignments of sequenced reads to the artificial chromosome and natural human (hg19) genome according to a number of metrics described below and summarised in Table 6.

[0375] Reads to Genome/Artificial Chromosome is the number of reads that align to the artificial chromosome and the human genome. For example, for the GM12878 sample, we aligned 2,029,597 reads to the artificial chromosome and 458,521,347 reads to the human genome sequence.

[0376] Fraction Dilution is the fraction of reads aligning to the artificial chromosome relative to the genome indicates the dilution of the standards relative to the sample library (Fraction Dilution). For GM12878 sample, 0.4% of library aligns to the artificial chromosome, indicating a 250-fold dilution factor.

[0377] Alignment Sensitivity is defined as the size of artificial DNA standard bases with overlapping alignments (true positive) divided by the total number of artificial DNA standard bases (true positive and false negative). For GM12878 samples, we observe a base-wise alignment sensitivity of 0.849.

[0378] Alignment Specificity is defined as the number of artificial DNA standard bases with overlapping alignments (true positive) divided by the total number of bases with overlapping alignments (true and false positive). For GM12878 samples, we observe a base-wise alignment specificity of 0.961.

[0379] The Detection Limit corresponds to the highest abundance DNA standard that is without read alignments and not reliably detected within the sequenced library. For GM12878 we observe a detection limit of 0.0037 attamoles/ul.

### Example 40

[0380] One example method of calculating pipetting error from conjoined DNA standards was performed as follows. Here we illustrate how to calculate pipetting error with conjoined DNA standards, and demonstrate how accurate the calculation of pipetting error is. This requires a known level of variation due to pipetting and variation from other sources. To do this, we first simulated the amount of variation due to pipetting and other sources based on sequenced libraries from DNA standards combined in equal combinations as previously described in Example 38. Variation due to pipetting error was defined as the difference in the abundance of individual DNA standards to the mean abundance of all DNA standards. This is termed the expected variation due to pipetting and is dependent and identical between the individual DNA standards that together comprise a single conjoined DNA standard. Variation due to other sources, such as library preparation and sequencing, was determined by analysis of technical replicate sequence libraries prepared from the same DNA standards Mixture C. Variation corresponds to the difference in normalized abundance between technical replicates of the DNA Flat mix. The expected variation due to other sources is independent and different between the individual DNA standards that together comprise a single conjoined DNA standard. We incorporated these two sources of variation into the observed abundance of DNA standards mixture according to:

Observed Abundance=Expected Abundance×expected variation due to pipetting×expected variation due to other sources

[0381] For this example, reads derived from DNA standards were simulated as previously described in Example 38. Read abundance was apportioned according to the known abundance of conjoined DNA standards, as indicated in Table 7. We plotted the observed abundance relative to the expected abundance for each DNA standards, as illustrated in FIG. 31A. This demonstrates the characteristic dependent linear slope distribution exhibited by the individual DNA standards that together comprise a single conjoined DNA standard. Notably, multiple DNA standards, conjoined together, that exhibit an irregular albeit dependent abundance, as illustrated in FIG. 31B, enable easier identification and omission of outliers due to pipetting.

[0382] We calculated the pipetting variation from the observed abundance of DNA standards (illustrated in FIG. 31B) as follows; for each conjoined DNA standard, we first plotted a line of best fit (non-linear regression with Y-intercept constrained to 0 and weighted to 1/Y²) though the 6 individual DNA standards. The deviation of the line slope from one is proportional to pipetting inaccuracy. For example, for conjoined DNA standard A, we observe a slope of 1.188, which estimates that an additional 18% of conjoined DNA standard A has been added due to pipetting error. Calculations for all conjoined DNA standards are summarised in Table 7. Comparison of the calculated pipetting variation to the expected pipetting variation indicates that using this approach we estimate the error due to pipetting within an average margin of 3%.

[0383] We can next minimise variation due to pipetting by normalizing each conjoined DNA standard measurements by this calculated variation as follows. We first force the linear distribution of conjoined DNA standards to exhibit a slope of 1, as illustrated in FIG. 31A,B. This improves the correlation (Pearson's r) between the expected and observed abundance of DNA standards to 0.99 (compared to 0.987 if DNA standards are independently measured without normalization; FIG. 31B). The improvement in quantitative accuracy by normalising for pipetting error is illustrated by the reduction of the coefficient of variation between conjoined DNA standards by ˜10-fold from 16.13 to 0.73 (illustrated in FIG. 31C). This enables users to calculate the amount of variation and inaccuracy due to pipetting variation and amount of variation from other sources and improve measurement confidence.

### Example 41

[0384] One example method of quantifying DNA standards abundance was performed. We first measured the frequency of alignments at each region of the artificial chromosome represented by a DNA standard. Following normalisation for length thereby assigned a observed of each DNA standards in reads per million per kilobase (RPKM). We plotted the measured DNA standard abundance compared to the known concentration (in attamoles/ul) of each DNA standard to assess quantitative accuracy as illustrated in FIG. 28A. Accordingly, the DNA standard quantification can be measured with correlation (Pearson's r) to provides an indication of concordance between observed and expected DNA standard abundance. For example, we observe a correlation of 0.94 for DNA standards previously prepared with the GM12878 genome DNA sample in Example 37. The slope indicates the linear proportionality of observed relative to expected abundance across the dynamic range of the DNA standards. For DNA standards combined as Mixture A with the GM12878 sample, the slope is 1.01. Results are summarised in Table 6.

### Example 42

[0385] One example method of identifying genetic variation in DNA standards was performed. Alignment (.sam) files prepared using methods described in Example 40 were first pre-processed using SAMtools (Li, Handsaker et al. 2009) and Picard tools as follows:
[0386] >java -jar CreateSequenceDictionary.jar R=hg19_chrT.fa O=hg19_chrT.dict
[0387] >samtools faidx hg19_chrT.fa>hg19_chrT.fai
[0388] >java -jar SortSam.jar INPUT=alignments.sam OUTPUT=alignments.sort.bam\
[0389] SORT_ORDER=coordinate
[0390] >java -jar ReorderSam.jar INPUT=alignments.sort.bam\
[0391] OUTPUT=alignments.sort.reorder.bam REFERENCE=hg19_chrT.fa
[0392] >java -jar BuildBamIndex.jar INPUT=alignments.sort.reorder.bam

[0393] We then used the GATK toolkit (McKenna, Hanna et al. 2010) according to published best practices (www.broadinstitute.org/gatk/guide/best-practices), including the Unified Genome Haplotype caller, to identify genetic variation using following default parameters:
[0394] >java -jar GenomeAnalysisTK.jar -T HaplotypeCaller -Rhg19_chrT.fa\
[0395] -I alignments.sort.reorder.bam --genotyping_mode DISCOVERY\
[0396] --defaultBaseQualities 30 -o variants.vcf

[0397] Note that the method described herein simultaneously identifies variation on the artificial chromosome, but also between the GM12878 genome DNA and the reference human genome. We can assess the performance of variant identification in the artificial chromosome using the as follows.

[0398] The Variants Covered corresponds to the proportion of genetic variation with alignment coverage. For example, alignments overlap 490 (88%) of variation instances in the DNA standards accompanying the GM12878 DNA sample.

[0399] Variant Sensitivity is defined as the number of variants correctly identified (true positive) divided by the total number of variants represented within the DNA standards (true+false negative). This depends both sequencing depth and variant detection. For example, for GM12878 sample, we achieve a variation sensitivity of 0.65.

[0400] Variant Detection is defined as the Variation Sensitivity divided by Variants Covered provides a measure of variant detection independent to sequencing depth or coverage. For example, for GM12878 sample, we achieve a variant efficiency of 0.73

[0401] Variant Specificity is the number of variants correctly identified (true positive) divided by the total number of variants detected (true positive+false negative). For example, for GM12878 sample, we achieve a variant specificity of 0.57.

[0402] Median Quality Score is defined as the PHRED scaled probability that a variant exists at this site, can be assigned to each identified variant. For the GM12878 sample, the median quality score for correct variant calls is 1,803, whilst the median quality score for erroneous variant calls is 61, as illustrated in FIG. 28E.

[0403] These results are summarised in Table 6. Descriptive statistics can be restricted to specific subsets of the variation represented within the DNA standards. For example, we can determine the sensitivity for detecting insertions within the DNA standards.

[0404] Erroneous variant calls on the artificial chromosome exhibit lower quality score than correct calls, as illustrated in FIG. 30A, indicating the utility of the quality score to distinguish erroneous variant identification in the accompanying variant identification in the GM12878 genome. Similarly, we observe that specific nucleotide substitutions (C to A and T to G) are particularly enriched in erroneously called variation, suggesting that these nucleotide variants should be interpreted with additional caution, as illustrated FIG. 30B.

[0405] The failure to identify variation correctly can often result from insufficient sequence coverage. This limit of sensitivity for identifying variation is illustrated in FIG. 28B,E by plotting the expected concentration of each DNA standard to the fraction of variation correctly assigned for each DNA standard. The highest concentration DNA standard for which variation is not detected indicates the lower limit at which variation can be reliably detected within the accompanying GM12878 genome sample.

[0406] We next analyzed the relative allele frequency generated by varying the relative concentration of reference and variant DNA standards. We plotted the expected relative allele frequency (ie. abundance ratio of reference to variant DNA standard) to the observed relative allele coverage (as indicated by DP in the GATK output .vcf file) for the 115 variants identified on the artificial chromosome. This plots, as illustrated in FIG. 28C, indicates the minimum correctly identified allele frequency was 1% and correct variation detection was limited to DNA standards at abundance above for 0.088 attamoles/ul. Restriction of alleles to only those with coverage >8 attamoles/ul improves allele frequency quantification with a correlation of 0.9574 and slope 0.9043, reflecting the importance of sufficient sequencing coverage for accurately detecting and quantifying rare variants.

[0407] We can also compare variant identification in the accompanying GM12878 genome DNA to variant identification in DNA standards with similar sequence read coverage. For example, the 25^{th}-75^{th} percentile of genome DNA variants exhibit a sequence coverage of coverage between 3 to 6-fold. This sequence coverage corresponds to five DNA standards that have a mean abundance of 0.15 attamoles/ul. Restricting our analysis to this subset of DNA standards suggests a sensitivity of 0.846, and specificity of 0.93 for identifying variation in the GM12878 genome.

### Example 43

[0408] One example method of quantifying variation in DNA standards between disease and normal human DNA samples was performed. Commercial DNA from normal lungs and adenocarcinoma of lungs was purchased from Origene (CD563993, CR563976; Rockville, MD). DNA Mixture A, as prepared in Example 18, was added to 1% total volume to lung adenocarcinoma DNA sample and DNA Mixture B is added to 1% volume to lung normal DNA sample (as determined by a spectrophotometer sold under the name NANODROP™). DNA samples and libraries were prepared and sequenced using methods previously described in Example 37. Reads were aligned and analysed using methods described in Example 41-42. Results are summarised in Table 6.

[0409] DNA samples may harbor mutations at heterogeneous frequencies (distinct from the homozygous/heterozygous allele frequencies discussed previously). For example, cancer cells harboring specific mutations may only comprise a small proportion of the sample sequenced. We plot observed allele frequency relative to expected allele frequency, as illustrated in FIG. 30C,D to determine the accuracy and sensitivity of allele quantification. For example, the lung adenocarcinoma sample has a Correlation (Pearson's r) 0.91 and slope of 0.95. The Limit of Detection indicates the lower frequency limit at which an allele can be reliably identified. For example, in this example the lower limit of detection is 0.0019 attomoles/ul. Similarly, the allele frequency provides an estimate of the sample purity, and would enable us to estimate the proportion of cancer cells within the sampled lung adenocarcinoma tissue for which we can resolve 1:100 allele frequencies down to 13-fold coverage or 0.0082 attomoles/ul.

### Example 44

[0410] One example method of adding DNA standards with mouse DNA samples. Mouse Liver tissue was obtained from a 4-month-old wild type Swiss SWR/J mouse. Genomic DNA was extracted mouse liver sample using a monophasic solution of phenol and guanidium isothiocyanate sold under the name TRIZOL™ (Invitrogen) according to the manufacturer's instruction. The extracted DNA samples were treated with RNase A followed by a cleanup with Genomic DNA Clean & Concentrator kit (Zymo Research). Purified DNA was quantified on the spectrophotometer sold under the name NANODROP™ (Thermo Scientific). DNA Mixture A, as prepared in Example 18, was added to 1% total volume to mouse DNA sample (as determined by NanoDrop). DNA samples and libraries were prepared and sequenced using methods previously described in Example 37.

[0411] The mouse genome (mm10) sequence was concatenated with the artificial chromosome (chrT) sequence to form a single file (mm10_chrT.fa). We then generated an index file (mm10_chrT_index.*) from the combined sequence file using bwa index according to manufacturer's instruction (Langmead and Salzberg 2012). We aligned sequenced reads (.fastq) to the index file (mm10_chrT_index.*) using bwa (Kim, Pertea et al. 2013) using methods described in Example 39. We analysed the alignment, quantification and variant detection of the DNA standards using methods described in Example 41, and illustrated in FIG. 28D. The results, summarised in Table 6, indicate similar levels of alignment specificity, sensitivity, and quantification with both human and mouse genome DNA, indicating the performance of DNA standards is not influenced by addition of mouse DNA samples or concomitant alignment with mouse genome.

### Example 45

[0412] One example method of analysing sequenced reads from DNA standards with non-human genomes was performed. We determined whether DNA standards perform comparably well as when used with different natural genomes from a range of different organism clades. Index builds for a range of organisms genomes with accompanying artificial chromosomes were generated by methods previously described in Example 35. We next aligned sequenced reads from the DNA standards prepared a Mixture C using methods as described in Example 38. Sequence reads were aligned to each organisms genome/artificial chromosome sequence using bowtie (Li and Durbin 2009) with the following default parameters:
[0413] >bowtie2 -x *_chrT_index -I MixtureC.R1.fq -2 MixtureC.R2.fq
   where * corresponds to organism genome (e.g. Dm3,hg19 etc.)

[0414] For each resultant alignment (.bam), we measured the alignment sensitivity and specificity using methods described in Example 40. These results, summarised in Table 4, indicate that DNA standard alignment is largely invariant regardless of the accompanying organism genomes, and that DNA standards perform comparably well when used with a range of different organism DNA samples.

### Example 46

[0415] One example method of identifying disease associated genetic variation in DNA standards was performed. To assess the performance of DNA standards that represent specific instances of variation associated with disease, produced by methods described in Example 22, we simulated sequenced reads using methods previously described in Example 38. Read abundance were apportioned according to genotype (eg. heterozygous or varying heterogeneous scale).

[0416] The K562 cell line harbors the TP53 Q139fs mutation, but not the BRAF V600E mutation. We added sequenced read to library from K562 genome DNA, prepared in Example 37. The reads are added at 1% total volume so that the DNA Standard modelling heterozygosity achieves similar coverage to accompanying K562 genome (ie. 10.4-fold). Sequence reads (from K562 and DNA standards) was aligned to the genome with the following parameters:
[0417] >bwa mem -M hg19_chrAB K562.R1.fq K562.R2.fq>alignments.chrB5.sam

[0418] Alignments were prepared as for Example 42, and we used the Genome Analysis Toolkit (DePristo, Banks et al. 2011) with the following parameters:
[0419] >java -jar ˜/1000G/GenomeAnalysisTK.jar -T HaplotypeCaller -R hg19_chrAB
[0420] -I alignments.chrB5. sam --genotyping_mode DISCOVERY
[0421] --defaultBaseQualities 30 -o variants.vcf

[0422] We next plotted the depth coverage (as indicated by DP in the GATK output .vcf file) of each variant in the variant DNA standards and the accompany K562 genome DNA relative to variant coverage, as illustrated in FIG. 7B. Additionally, we plot the confidence with which each genotype is assigned relative to known concentrations of each DNA standard, as illustrated in FIG. 7C, thereby indicating the confidence with which SNPs are identified across a 10⁴ fold dynamic range.

[0423] To model an increasingly small sub-population of cells harboring a mutation against a wild-type cell population, we titrated the K562 cell line DNA library (containing TP53 Q139fs mutation) against a background of GM12878 genome DNA library (that does not contain the TP53 Q139fs mutation) to form a 10-fold serial dilution encompassing a 105 dynamic range. We then aligned these diluted libraries to the human genome/artificial chromosome using methods described in previous Example 39. Comparison of disease-associated variants identified in the DNA Standards and accompanying genome DNA sample is illustrated in FIG. 7B. We observed that the V600E and Q139fs mutations could be identified accurately when the variant and reference DNA standards were in equal abundance (ie. heterozygous genotype) and, similarly, we could robustly identify the Q139fs mutation in the accompanying K562 DNA sample. However, we were unable to detect the Q139fs mutation when the variant DNA standard was diluted 10-fold relative to the reference DNA standard or when the accompanying DNA sample comprises 10-fold or more dilution of the K562 DNA.

### Example 47

[0424] One example method of assembly of structural variants represented by DNA standards was performed. DNA standards representing structural variation on the artificial chromosome (as previously described in Example 23) was added to 1% total volume to K562 genome DNA sample. DNA samples and libraries were prepared and sequenced using methods previously described in Example 37, and aligned to the artificial chromosome/human genome using methods previously described in Example 39.

[0425] We profiled sequence coverage of the following structural variation on the artificial chromosome; Three DNA standards of length 1837, 1824 and 1899 (SEQ ID NO: 171-173) that contained an inverted DNA sequence of length 635, 624 and 699 nt relative to the reference artificial chromosome (illustrated in FIG. 32A). Three DNA standards of length 1898, 1865 and 1896 (SEQ ID NO: 174-176) that contained large DNA sequence insertions of length 698,665 and 696 relative to the reference artificial chromosome (illustrated in FIG. 32B). Three DNA standards of length 1200 nt (SEQ ID NO: 177-179) that contained large DNA sequence deletions of length 651, 634 and 683 nt relative to the reference artificial chromosome (illustrated in FIG. 32C). Three DNA standards of length 1200 nt (SEQ ID NO: 180-182) that contained large DNA sequence tandem duplications of 4 repeat copies×96 nt (380 nt), 2 copies×202 (438 nt) copies and 2 copies×621 nt relative to the reference artificial chromosome (illustrated in FIG. 32D). Three DNA standards of length 1988, 1580 or 1430 nt (SEQ ID NO: 183-185) that contained a mobile element repeat insertion relative to the reference artificial chromosome. The inserted repeat sequence matched the ancient repeat unit of the AluSx, MIRb, L2a transposons as previously described (illustrated in FIG. 32E).

### Example 48

[0426] One example method of using DNA standards to calibrate measurement of copy-number repeats was performed. To assess the performance of DNA standards that represent D4Z4 copy number variation, produced by methods described in Example 23, we simulated sequenced reads using methods previously described in Example 38. Read abundance were apportioned according to copy number (from 10-150 copies) as previously described in Example 23.

[0427] We added sequenced read to library from K562, GM12878, Lung Adenocarcinoma and Normal Lung DNA samples using methods described in Example 37. We aligned reads to the artificial chromosome and to the human (hg19) genome using bwa (Langmead and Salzberg 2012) as previously described in Example 39. The observed abundance (in reads per million) of the DNA standards was plotted against known repeat copy number, as illustrated in FIG. 33B, enabling an assessment the quantification of repeat copy number. We compared DNA standard copy number to coverage of the D4Z4 repeat sequence in the human genome from the accompanying human DNA sample. After normalizing for differences in the size of the D4Z4 repeat unit (˜3,301 nt) and the DNA standards, we estimate the number of D4Z4 repeat units in the accompanying patient genome by comparison to DNA standards. For example, we estimate 161 repeat copies in the GM12878 genome, as illustrated in FIG. 33B.

### Example 49

[0428] One example method of adding DNA standards to environmental DNA samples. Soils was collected from Watsons Creek and mangrove patch sites in Queensland, Australia. Soils samples were stored at 4° C. prior to both chemical and biological analysis. Genomic DNA from soil samples was extracted using PowerSoil™ DNA kit (MoBio Laboratories, Carlsbad, CA, USA) according to the manufacturer's protocol. All genomic DNA was quantified by spectrophotometer sold under the name NANODROP™ (Thermo Scientific). DNA Mixture A, as prepared in Example 18, was added to 1% total volume to soil DNA sample (as determined by spectrophotometer sold under the name NANODROP™) DNA sample prep kit sold under the name TRUSEQ™ DNA PCR-free Sample Prep Kit (Illumina) was used to prepare DNA libraries according to manufacturer's instructions. Prepared libraries were quantified on Qubit (Invitrogen) and verified on Agilent 2100 Bioanalyzer (Agilent Technologies) before samples were pooled. Sequencing is performed using a DNA sequencing machine sold under the name HISEQ™ 2500 instrument with 125 nt paired-end reads (Illumina).

### Example 50

[0429] One example method of aligning DNA standard reads to microbe genomes was performed. Sequence (.fastq) files produced by a DNA sequencing machine sold under the name HISEQ™ 2500 instrument were subject to de-multiplexing. Low-quality reads and sequences or adaptor contaminant sequences were removed using trim_galore according to manufacturer's instructions
[0430] (www.bioinformatics.babraham.ac.uk/projects/trim_galore/)

[0431] We combined all artificial microbe genomes, produced by methods described in Example 9, to generate a single index build using methods previous described in Example 39. We aligned sequenced reads to artificial microbe genome using bwa (Li and Durbin 2009) with the following parameters:
[0432] >bwa mem -M ArtChr.bwa sequence.read1.fq sequence.read2.fa alignments.sam

[0433] We assessed alignments (.bam files) to artificial microbe genomes according to; Reads that align to artificial microbe genomes. For example, in Soil Sample 1 we aligned 4,317,629 reads to the artificial microbe genomes. The Fraction Dilution is the fraction of reads aligning to the artificial microbe genomes relative to total reads. For example, in Soil Sample 1, 5.6% of reads within the library align to the artificial microbe genomes, corresponding to a 17.1-fold dilution factor. The Detection Limit corresponds to the highest abundance DNA standard that is not reliably detected within the sequenced library and is without alignments. For Soil Sample 1 we observe a detection limit of 1.0093. Sensitivity is defined as the number of DNA standard bases with overlapping alignments, as illustrated in FIG. 35C. This is dependent on sequencing depth and alignment. For example, in Soil Sample 1, 80.2% of DNA standard bases have overlapping alignments. Results are summarised in Table 10.

### Example 51

[0434] One example method of using DNA standard reads to calibrate assembly of microbe genome community was performed as follows. We performed de novo sequence assembly using Velvet(Zerbino and Birney 2008) according to manufacturer's instructions:
[0435] >velvet_1.2.10/velveth./output 91 -sam soil.sam
[0436] >velvet_1.2.10/velvetg./output -exp_cov auto -cov_cutoff 0 -scaffolding no

[0437] We assessed contig assemblies according to; Coverage is the proportion of DNA standard size that are overlapped by assembled contigs. This is dependent on both sequencing depth and assembly. For example, in Soil Sample 1 we assembled contigs that cover 31.9% of the DNA standards, as illustrated in FIG. 35D. Nodes is the number of distinct contigs correctly assembled (that match the DNA standards). For example, in Soil Sample 1, we assembly 20 (out of 36) nodes. The N50 statistics refer to the median mass of contigs relative to the total assembly (N50). For example, in Soil Sample 1 we determined a N50 statistic of 508. The Maximum Contig Size the largest size correctly assembled contig. For example, in Soil Sample 1 we assembled contigs up to 904 nt that corresponds to 92.1% of the DNA standard full-length. Total Bases in Assembly is the number of reads aligning to correctly assembled contigs relative to total number of reads aligning to DNA standards. For example, in Soil Sample 1 we align 22.1% reads to assembled contigs. These results are summarised in Table 10.

### Example 52

[0438] One example method of using DNA standards to calibrate quantification of microbe genomes was performed. To assess the accuracy of quantification, we plotted the observed abundance (in RPKM) relative to the known concentration (in attamoles/ul) of each assembled contig (as illustrated in FIG. 36A,B). We first measured the frequency of alignments at each region of the artificial microbe genome represented by a DNA standard. Following normalisation for length, we assigned a observed of each DNA standards in reads per million per kilobase (RPKM). We plotted the measured DNA standard abundance compared to the known concentration (in attamoles/ul) of each DNA standard to assess quantitative accuracy as illustrated in FIG. 35A. Accordingly, the DNA standard quantification can be measured with correlation (Pearson's r) to provides an indication of concordance between observed and expected DNA standard abundance. For example, for DNA standards prepared with Soil Sample 1, we observe a correlation of 0.96 and slope is 1.061. Results are summarised in Table 10.

[0439] Genome assembly is dependent on sufficient sequencing coverage, as illustrated in FIG. 35A. We observe that DNA standards at high concentration exhibit full sequence coverage and assembly, while, by contrast DNA standards at low expected concentration show spare sequence coverage and poor assembly, as illustrated in FIG. 35B. This enables us to determine the expected coverage and assembly of microbe genomes according to their relative abundance in the accompanying soil sample.

### Example 53

[0440] One example method of using DNA standards to measure differences between multiple environmental DNA samples was performed. We first extracted DNA from three soil samples with high organic content with soil samples for comparison to three soil samples with low organic content, using methods previously described in Example 49. DNA Mixture A, as prepared in Example 18, was added to 1% total volume to three soil samples with high organic content and DNA Mixture B is added to 1% volume to three soil samples with low organic content. DNA samples and libraries were prepared and sequenced using methods previously described in Example 49. Reads were aligned and analysed using methods described in Example 50-52. Results are summarised in Table 10 and illustrated in FIG. 36A,B.

[0441] We plotted the observed abundance of DNA standards forming Mixture A in high-organic content soil samples relative to observed abundance of DNA standards forming Mixture B in low-organic content soil samples to illustrate the DNA standard fold-changes in FIG. 36C. We observe a correlation of 0.8328 (Pearson's r) and slope of 1.149, as summarised in Table 11, indicating the accuracy with which differential DNA abundance is measured.

### Example 54

[0442] One example method of using DNA standards to calibrate quantification of microbe genomes in environmental DNA samples was performed. Fecal samples were collected from a healthy male in a 50 mL polypropylene tube. DNA was extracted from the fecal samples (0.25 g) using the MoBio PowerFecal™ DNA Isolation Kit (MoBio Laboratories, Carlsbad, CA, USA) according to the manufacturer's protocol.

[0443] DNA Mixture A, as prepared in Example 18, was added to 1% total volume to two replicate fecal samples from healthy human subject. DNA samples and libraries were prepared and sequenced using methods previously described in Example 49. Reads were aligned and analysed using methods described in Example 50-52. Results are summarised in Table 10 and illustrated in FIG. 36D-F.

[0444] We assessed the assembly of DNA standards, using methods described above in Example 51. For example, in fecal sample 1, DNA standards comprised 0.89% of the total reads (2 million from 225 million). Sequenced reads were assembled into 14 contigs that encompasses 53.2% coverage of the DNA standards. We measured the abundance of assembled DNA standard contigs using methods previously described in Example 52. This provides an internal reference ladder for the quantification of metagenomes to inform microbe community analysis (Singh, Behal et al. 2009) and results are summarized in Table 10. For example, for Fecal Sample 1 we observe a correlation of 0.97, and slope of 1.041, indicating high quantitative accuracy for assembled DNA standards.

### Example 55

[0445] One example method of using DNA standards as template for PCR amplification was performed. DNA standards can be used in methods of amplicon sequencing, such as immune-repertoire sequencing where mammalian immunoglobulin sequence diversity is amplified and sequenced. We previously manufactured DNA representing artificial TCRγ clonotypes, using methods described in Example 25. We subjected DNA standards to PCR amplification (KAPA Biosystems) using universal BIOMED2 primer sequences (van Dongen, Langerak et al. 2003) for the TCRγ loci (present in Tube A and B) according to manufacturer's instructions. Amplified products were analyzed using a BioAnalyser (2100 High Sensitivity DNA Assay; Agilent). BioAnalyser traces indicate the amplification of a correctly sized 750 nt product from all 15 TCRγ clonotype DNA standards, as illustrated in FIG. 34. This confirms the utility of DNA standards as templates for PCR amplification during immune-repertoire sequencing.

[0446] We next produced a genomic DNA mixture of 10% gDNA from clonal T-ALL cells and 90% gDNA from a healthy's adult's PBMC, to model a clonal population of TCRγ clonotypes. The clonal T-ALL cell line, KARPAS 45 (Catalog N. 06072602, Human T-cell Leukaemia) was purchased from Cell Bank Australia. KARPAS 45 cells were cultured according to European Collection of Cell Cultures growth protocols and standards. Briefly, KARPAS 45 cells were cultured in RPMI 1640 medium (Gibco®) supplemented with 15% fetal bovine serum (FBS) at 37° C. under 5% CO₂. Genomic DNA was extracted from KARPAS using a monophasic solution of phenol and guanidium isothiocyanate sold under the name TRIZOL™ (Invitrogen) according to the manufacturer's instruction. The extracted DNA samples were treated with RNase A followed by a cleanup with Genomic DNA Clean & Concentrator kit (Zymo Research). Purified DNA was quantified on the spectrophotometer sold under the name NANODROP™ (Thermo Scientific). Genomic DNA from a healthy adult's PBMC was extracted using the MoBio UltraClean kit (Catalog No. 12334-250). gDNA was eluted in solution TD3 and analysed on the spectrophotometer sold under the name NANODROP™ (Thermo Scientific).

[0447] The artificial TCRγ clonotype DNA standards were then added at 1% of the total genomic DNA concentration of the mixture. We performed PCR amplification (KAPA Biosystems) using universal BIOMED2 primer sequences (as described above) on combined clonotype DNA standards and T-ALL/PBMC genome DNA mix. PCR amplicons were purified using the Wizard® SV Gel and PCR Clean-Up System (Promega) and were quantified on the spectrophotometer sold under the name NANODROP™ (Thermo Scientific) and verified on the Agilent 2100 Bioanalyzer (Agilent Technologies).

[0448] The Nextera XT Sample Prep Kit (Illumina) was used to prepare libraries from PCR amplicons according to manufacturer's instructions. Prepared libraries were quantified on Qubit (Invitrogen) and verified on Agilent 2100 Bioanalyzer (Agilent Technologies) before samples were pooled. Sequencing is performed using a DNA sequencing machine sold under the name HISEQ™ 2500 instrument with 125 nt paired-end reads (Illumina).

### Example 56

[0449] One example method of using DNA standards in analysis of mammalian immunoglobulin sequence diversity was performed. To assess the performance of DNA standards that represent artificial TCRβ clonotypes, produced by methods described in Example 25, we first performed in silico PCR amplification (insilico.ehu.es/PCR/) of DNA standards with the BIOMED-2 TCRβ multiplex primer sequences (Tubes A-C)(van Dongen, Langerak et al. 2003) to produce a ˜750 nt amplicon sequence. Primer binding sites were required to have exact complementarity and we assumed no primer-specific amplification bias. We next simulated sequenced reads from the amplicon sequences using methods previously described in Example 38. Read abundance were apportioned according to the relative concentration of the DNA standards as described in Example 25. Reads are added at 1% fraction to previously published experimental amplicon sequencing libraries (.fastq) of the TCRβ loci in 3 healthy human subjects (Zvyagin, Pogorelyy et al. 2014). This data was retrieved from the NCBI Short Read Archive (SRA) with the Accession ID: SRP028752. These three libraries represent a TCRβ clonotypes profile in healthy adult human subjects. The human library files are analyzed using MiTCR according to manufacturer recommendations (Bolotin, Mamedov et al. 2012).

[0450] For each library, we determined the following metrics as summarised in Table 8. Number of Reads aligning to the human genome/artificial TCRβ clonotypes and the number of reads aligning to the DNA standards. In this example for Human Subject A we observe 25,191 reads that align to artificial TCRβ clonotypes. Fraction of Reads aligning to the artificial TCRβ clonotypes indicates the dilution factor of 1% for Human Subject A. The Limit of Detection indicates the highest abundance DNA standard that is not detected by sequenced reads in the library and the Dynamic Range indicates the fold difference between the highest and lowest abundance DNA standard detected by sequenced reads in the library. The Clone Sensitivity indicates the proportion of DNA standard for which the artificial TCRβ clonotype is correctly assigned. This can also include accuracy of Vβ,Dβ,Jβ segment assignment and detection of insertion/deletions.

[0451] We plot the observed frequency of artificial TCRβ clonotype relative to known concentration, to ascertain the accuracy of TCRβ clonotype abundance measurements by correlation and slope (results summarized in Table 8). The abundance of artificial TCRβ clonotype relative to natural TCRβ clonotypes in healthy human subjects is illustrated in FIG. 13E. The abundance of artificial TCRβ V,J and D segments usage relative to natural TCRβ V,J and D segments in healthy human subjects is illustrated in FIG. 13F.

### Example 57

[0452] One example method of using DNA standards in analysis of 16S rRNA phylogenetic profiling was performed. We produced 6 DNA standards (SEQ ID NO: 161-166) of length 1018 nt that match 16S rRNA genes from 6 different artificial microbe genome representing a range of taxa, size, GC content and rRNA operon count as indicated Table 9. The DNA standards are designed to overlap the two universal 16S primers in V3 region of the 16S rRNA gene, with additional flanking 250 nt sequence. The 16S DNA standards form a template for the PCR amplification to generate unique amplicon sequence. We performed in silico PCR amplification (insilico.ehu.es/PCR/) with the universal 16S primer sequences. This generated a unique and distinct amplicon from each of the DNA standards. The abundance of each amplicon was apportioned according to (i) initial abundance of the microbe genome within the artificial community and (ii) rRNA operon copy number within artificial microbe genome, as indicated in FIG. 11. Amplicon abundance can also be influenced by primer binding efficiency, with the differential primer binding efficiency able to be identified and normalized using the 16S DNA standards. However, for this analysis we have assumed no bias in PCR amplification. We next generated a sequenced read library from 16S DNA standards using methods previously described in Example 38. Read abundance was apportioned according to the intended amplicon concentration and sequenced read library was combined with sequenced read library generated from the 16S profiling of the artificial microbe community. We plotted the observed abundance of 16S DNA standards relative to the intended concentration as illustrated FIG. 11B. Note that rRNA operon count is required to fully normalize abundance of artificial microbe genome, as illustrated in FIG. 11C. This indicates the limit of detection below which any microbe genomes in the companying sample may not be reliably detected.

### Example 58

[0453] One example method of using DNA standards to calibrate GC bias in sequencing was performed as follows. We designed and manufactured 9 DNA standards that were distinguished into 3 different groups corresponding to ˜27%, 68% and 74% GC content (SEQ ID NO: 140-148). All DNA standards are of similar length (1,000 nt) to minimize length-specific biases between GC-Meta standards. We combined 9 DNA Standards at equal concentration to form a single mixture using methods previously described in Example 38. This mixture was added to 1% total volume to DNA harvested from soils collected from Watsons Creek and mangrove patch sites in Queensland. Combined DNA samples were prepared as libraries and sequenced using methods previously described in Example 49.

[0454] We first aligned sequenced reads to artificial microbe genomes using bwa (Li and Durbin 2009):
[0455] >bwa mem -M chrt.bwa sequence.read1.fq sequence.read2.fa/>alignments.sam

[0456] We next plotted the abundance aligned reads relative to their GC content, as illustrated in FIG. 37. For comparison, we generated simulated reads with a matched length and frequency from the DNA standards. Comparison of sequenced and simulated reads indicates under-sampling of both high GC- and AT-rich standards, as illustrated FIG. 37A-C. This difference in observed and expected abundance can inform normalisation to minimise the impact of GC-dependent bias in DNA quantification.

### Example 59

[0457] One example method of using synthetic DNA standards mimicking TCRγ clonotypes to calibrate immune-repertoire sequencing was performed as follows. TCRγ (TCRG) is a preferential target for clonality analyses due to the relatively restricted suite of clonotypes it generates. In this example we designed, manufactured and used a synthetic TCRG standard during multiplex PCR and immune-receptor sequencing.

[0458] We retrieved 10 Vγ segments, 5 Jγ segments and 2 Cγ segments and flanking intronic sequence from TCRG loci in the reference human genome (hg19; FIG. 12). Each segment or intronic sequence was separately inverted and shuffled to remove homology to known natural sequences with the exception of sequences complementary to the forward and reverse primer sequences as described in Carlson et. al. 2013. We then combined the synthetic TCRG segments in all forward and reverse primer combinations. Segments were joined together with each interspersed with a single GC rich hairpin sequence designed to retard read-through PCR amplification. The sequences were then combined into 4 larger sequences that were synthesized (SEQ ID NOs: 203-206). Sequences were synthesized in four parts GeneArt (Life Technologies) and inserted into pMA-RQ vector. The four parts of the TCRG standards were ligated into one contiguous sequence into pUC19 using NEBuilder® HiFi DNA Assembly Master Mix (New England Biolabs). The final 14.4 kb plasmid was grown up in a 50 mL culture, purified and used for DNA sequence verification. For TCRG standards synthesis, the final plasmid was digested with SapI and the 12 kb fragment was gel extracted with Zymoclean™ Gel DNA Recovery Kit (Zymo Research).

[0459] The clonal T-ALL cell line, KARPAS 45 (Catalog N. 06072602, Human T-cell Leukaemia) was cultured according to European Collection of Cell Cultures growth protocols and standards. Briefly, KARPAS 45 were cultured in RPMI 1640 medium (Gibco®) supplemented with 15% fetal bovine serum (FBS) at 37° C. under 5% CO₂. Genomic DNA (gDNA) was extracted from KARPAS 45 using a monophasic solution of phenol and guanidium isothiocyanate sold under the name TRIZOL™ (Invitrogen) according to the manufacturer's instruction. The extracted DNA samples were treated with RNase A followed by a cleanup with Genomic DNA Clean & Concentrator kit (Zymo Research). Purified DNA was quantified using the BR dsDNA Qubit Assay on a Qubit 2.0 Fluorometer (Life Technologies). gDNA from a healthy adult's PBMC used as background. Briefly, gDNA was extracted using the MoBio UltraClean kit (Catalog No. 12334-250) according to manufacturer's instructions and eluted in solution TD3. The purified gDNA was analyzed on the spectrophotometer sold under the name NANODROP™ (Thermo Scientific) and quantified using the BR dsDNA Qubit Assay on a Qubit 2.0 Fluorometer (Life Technologies).

[0460] In order to test the sensitivity, reproducibility and quantitative accuracy of the synthetic TCRG standards in a biological background, a mixture of gDNA from clonal T-ALL cells (KARPAS 45) was diluted to a 10, 1 and 0.1% final concentration with gDNA from a healthy adult's PBMC gDNA (that comprises a complex background of TCRG gentoypes) and 10% synthetic TCRG standards were created as described in Table 12. The individually prepared mixture was used as a template in a multiplex PCR reaction containing equimolar ratios of the VF and JR primer pool, KAPA HiFi HotStart Ready Mix (KAPA Biosystems) according to the manufacturer's recommendations. The PCR product from the multiplex PCR reaction was purified using the DNA Clean & Concentrator™-5 (Zymo Research). The purified PCR product was quantified using the BR dsDNA Qubit Assay on a Qubit 2.0 Fluorometer (Life Technologies) and verified on the Agilent 2100 Bioanalyzer with an Agilent High Sensitivity DNA Kit (Agilent Technologies).

[0461] The Nextera XT Sample Prep Kit (Illumina®) was used to prepare DNA libraries according to manufacturer's instructions. Prepared libraries were quantified on Qubit (Invitrogen) and verified on Agilent 2100 Bioanalyzer with a Agilent High Sensitivity DNA Kit (Agilent Technologies). Libraries were sequenced on a DNA sequencing machine sold under the name HISEQ™ 2500 (Illumina®) at the Kinghorn Centre for Clinical Genomics.

[0462] Upon receipt of sequencing files, reads were aligned to an index comprising all possible real and synthetic TCRG using the following parameters:
[0463] bowtie2 -p 12 -x tcrg_combs -1 10TALL_TCRGstds1.1.fq -2 10TALL_TCRGstds1.2.fq -S 10TALL_TCRGstds1.combs.sam

[0464] We first analysed the synthetic TCRG standards. We first determined the relative abundance of each synthetic standard according to alignment frequency. We first noted that products were generated and sequenced from all primer combinations, providing positive control indication of their function.

[0465] We can also use the relative abundance of sequenced amplicons to assess the quantitative efficiency of primer combinations. Since all amplicon templates derive from a single sequence, the initial template abundance is uniform, and therefore differences will reflect differences in either primer efficiency and primer abundance in multiplex mixture. Therefore, we assembled a matrix of the relative abundance of each synthetic standard according to alignment frequency (Table 12). This matrix indicates relative performance of each primer pair within the PCR reaction. For example, the V11 forward primer in combination with the J1 reverse primer performs poorly, less than 4.1 times than average, whilst the V9 forward primer in combination with the JP1 reverse primer performs more than 2.15-fold better than average. This provides a normalization factor that can be used to adjust the quantification of the TCRG clonotypes in the accompanying sample.

[0466] Notably, this normalisation factor is calculated from internal synthetic controls that are subject to the same conditions; including temperature that defines primer hybridization and the relative primer concentrations in the multiplex primer mixtures. Therefore, we next determined the relative abundance of TCRG clontoypes in the accompanying mixture. Whilst some clonotypes were absent from the library, we could conclude that they were not in the RNA sample (since we have previously validated each primer with the synthetic standards above). We then adjusted the relative concentration of each TCRG clonotype according to the normalization factor calculated from the synthetic standards above. Thus, the synthetic DNA standards described herein provide a useful calibration of NGS methods directed towards analysis of immune repertoire sequences.

### Example 60

[0467] One example method of using conjoined synthetic standards as quantitative DNA ladders was performed as follows. As explained above, errors in pipetting can cause variation between the abundance of multiple standards. To remove pipetting errors, individual DNA standards can be joined together. In such a case, differential copy number achieves differential abundance. Dependent variation between individual standards can be used to calculate the error due to variation in pipetting and ensure exact frequencies between alternative standards.

[0468] We designed conjoined standards in the following format (summarized in FIG. 39). We designed multiple individual DNA standards (A, B, C and D) each of 600 nt. These DNA standards were then organized into an ABB or CDD format that could then be joined together into a single contiguous sequence comprising 1 copy A; 2 copies B; 4 copies of C and 8 copies of D (SEQ ID NOs: 207-290). In addition, we added a further small linker sequence that hosts a I-Sce I restriction digestion site between individual DNA standards. This enabled us to liberate individual standards from the multiple standard after pipetting by restriction digestion and thereby generate mixtures of individual standards without variation due to pipetting.

[0469] Sequences comprising the combined repeats in the ABB and CDD organization were synthesized individually by Gene Art (Life Technologies). Each conjoint standard consists of one ABB and four CDD's. The five fragments were ligated into pUC19-FAFB (pUC19 with a FAFB filler sequence) using NEBuilder® HiFi DNA Assembly Master Mix according to manufacturer's protocol. The final plasmid of each conjoint standard, e.g., pUC19-FAFB-GA98 is digested with EcoRI and BamHI and subsequently gel extracted with Zymoclean™ Gel DNA Recovery Kit (Zymo Research) to obtain the 10.4 kb conjoint DNA standard.

[0470] The concentration of all 21 conjoint DNA standards was measured using the BR dsDNA Qubit Assay on a Qubit 2.0 Fluorometer (Life Technologies). The conjoint DNA standards mixtures were combined to form a mixture spanning a 10⁶-fold concentration range using an epMotion 5070 epBlue™ software program to make the final mixtures robotically.

[0471] The mixture A was then added to final concentration of 10% with total gDNA extracted from the GM12878 cell line. GM12878 was provided by Madhavi Maddugoda (Epigenetics Research Group, Garvan Institute of Medical Research). GM12878 cells were cultured according to Coriell Cell Repositories growth protocols and standards. Briefly, GM12878 were cultured in RPMI 1640 medium (Gibco®) supplemented with 10% fetal bovine serum (FBS) at 37° C. under 5% CO2. DNA was extracted from GM12878 and mouse using a monophasic solution of phenol and guanidium isothiocyanate sold under the name TRIZOL™ (Invitrogen) according to the manufacturer's instruction. The extracted DNA samples were treated with RNase A followed by a cleanup with Genomic DNA Clean & Concentrator kit (Zymo Research). Purified DNA was quantified on the spectrophotometer sold under the name NANODROP™ (Thermo Scientific).

[0472] The Nextera XT Sample Prep Kit (Illumina®) was used to prepare DNA libraries according to the manufacturer's instructions. Prepared libraries were quantified on Qubit (Invitrogen) and verified on Agilent 2100 Bioanalyzer with a Agilent High Sensitivity DNA Kit (Agilent Technologies). Libraries were sequenced on a DNA sequencing machine sold under the name HISEQ™ 2500 (Illumina®) at the Kinghorn Centre for Clinical Genomics.

[0473] We analysed the sequenced reads from the conjoined synthetic standards as follows. We first aligned sequenced reads to an index (comprising of each individual standard) with the following parameters:
[0474] bowtie2 -x conjoined sequences -1 NGSreads.1.fq -2 NGSreads.2.fq -S output.sam

[0475] We next determined the abundance of each individual standard according to the alignment frequency. We then plotted the weighted normalized known concentration of each individual standard (derived from both the concentration of the hosting conjoined standard and the copy number within the conjoined standard) compared to the weighted-normalized measured abundance (FIG. 39). This indicated a degree of variation in pipetting. For example, we observe a notable outlier conjoined standard that had been combined in the mixture at greater concentration than expected (indicated in FIG. 39B). Given that this outlier equally affects all standards within the conjoined standard indicates that the outlier is due to pipetting, rather than an alternative technical variable and could therefore be removed prior to further analysis.

[0476] We determined a correlation of 0.9451 between the known concentration and the measured abundance of standards. We next applied the adjustment to force all individual standards within a conjoined standard to exhibit a slope of 1 (described in detail above). Adjustment improved the distribution of standards, adjusted for outliers, and improved the correlation to 0.9806 (FIG. 39C), indicating the improved quantitative accuracy of the DNA standards.

### Example 61

[0477] One example method of using synthetic standards mimicking fusion gene events was performed as follows. Fusion gene events contribute to many human cancers, however, they can be difficult to identify using RNA sequencing methods. Synthetic RNA standards can be used to emulate fusion genes, and thereby assess the ability to detect fusion genes. In this example we designed, manufactured and used synthetic fusion-gene standards to calibrate an RNA sequencing method.

[0478] We selected 24 normal genes (from the list of RNA standards described in Example 36 above). We then assigned a fusion site within the intron of each gene, and paired sites to emulate 12 reciprocal translocation events. These 12 events then generated the sequence for 24 fusion genes (each translocation forms two reciprocal fusion genes; see SEQ ID NOs: 291-314 and FIG. 40).

[0479] To generate fusion gene sequences hosted in an expression vector, we employed NEBuilder® HiFi DNA Assembly Master Mix (New England Biolabs) according to the manufacturer's protocol. Briefly, 40 μL aliquots of α-Select Silver Efficiency Chemically Competent E. coli (Bioline) were thawed on ice and transformed with 2 μL of diluted NEBuilder® HiFi DNA Assembled product per the manufacturer's suggested protocols. Transformed cells were plated on prewarmed 100 μg/mL ampicillin plates and incubated at 37° C. overnight (18 hours). One colony from each plate was used to inoculate 5 mL LB broth containing 100 μg/mL ampicillin. Inoculated tubes were incubated overnight on a shaker at 37° C.

[0480] Plasmids were isolated using the Qiagen Spin Miniprep Kit. The sequence of the purified plasmids was validated with Sanger sequencing.

[0481] To generate synthetic RNA standards, we employed an in vitro transcription reaction. For RNA synthesis, each plasmid was linearized with EcoRI-HF (New England Biolabs), followed by a Proteinase K treatment. The linearized plasmid was cleaned up using the Zymo ChIP DCC columns (Zymo Research). An in vitro transcription reaction was performed to synthesize the RNA transcripts. Full-length RNA transcripts were synthesized using the MEGAscript® Sp6 kit (Life Technologies) according to the manufacturer's instructions. The RNA was purified using a RNA Clean & Concentrator-25 column (Zymo Research) using the manufacturer's >200 nt protocol. Purified RNA transcripts were verified on the Agilent 2100 Bioanalyzer with the RNA Nano kit (Agilent Technologies) and comprised stock inventory.

[0482] Synthetic fusion-gene standards were diluted to form a mixture spanning 10⁶ fold concentration, including a dynamic range in expression between each other and with the normal parent gene. All RNA Fusion transcripts' concentrations were measured on a Qubit 2.0 Fluorometer (Life Technologies, Carlsbad, CA, USA). The RNA fusion transcripts were pooled using an epMotion 5070 epBlue™ software program to assemble the final mixtures robotically spanning a 10⁶-fold concentration range. This formed the final mixture stock.

[0483] The fusion gene synthetic standard mixtures were spiked into natural RNA samples derived from two human cell-types. K562 and GM12878. K562 and GM12878 cells were cultured according to Coriell Cell Repositories growth protocols and standards. Briefly, K562 and GM12878 were cultured in RPMI 1640 medium (Gibco®) supplemented with 10% fetal bovine serum (FBS) at 37° C. under 5% CO₂. Total RNA was extracted from K562 and GM12878 using a monophasic solution of phenol and guanidium isothiocyanate sold under the name TRIZOL™ (Invitrogen) according to the manufacturer's instructions. DNAse treatment was subsequently performed on each sample with TURBO DNase (Life Technologies) followed by a cleanup with the RNA Clean and Concentrator-25 Kit (Zymo Research). Total RNA was run on an Agilent Bioanalyzer 2100 to assess intactness and both the spectrophotometer sold under the name NANODROP™ (Thermo Scientific) and Qubit (Life Technologies) were used to determine the concentration. Only RNA with a RNA integrity number (RIN)>8.0 was used for library preparation.

[0484] K562 RNA contains the known BCR-ABL fusion gene. We generated a serial dilution K562 to GM12878 RNA at a 1:1, 1:10 and 1:100 fold ratio. 1 μg of combined RNA was used in each library preparation. The RNA Fusion standards were added at 10% of the total RNA concentration of mixtures of K562 and GM12878 before library preparation. The RNA mixture was ribo-depleted using Ribo-Zero™ Magnetic Kit (Human/Mouse/Rat) (Epicentre). The ribo-depleted RNA was used to prepare libraries using KAPA Stranded RNA-Seq Library Preparation Kit for Illumina® platforms (KAPA Biosystems) according to the manufacturer's protocol. Prepared libraries were quantified using the HS dsDNA Qubit Assay on a Qubit 2.0 Fluorometer (Life Technologies, Carlsbad, CA, USA) and verified on Agilent 2100 Bioanalyzer (Agilent Technologies) before samples were pooled for sequencing.

[0485] We analysed sequenced reads as follows. First, sequenced reads were aligned to an index comprising both the synthetic chromosome and the human genome sequence (hg38) using Tophat2 aligner with the fusion-search option enabled as follows:
[0486] tophat --fusion-search -G gencode.v23.annotation.chrT rna.gtf hg38.chrT 100K_RFMXA.1.fq 100K_RFMXA.2.fq

[0487] We then processed the resulting alignment file (accepted_hits.bam) and fusion.out files to assess synthetic gene performance. We correctly identified 19 (out of 24) fusion genes, whilst the remaining 5 unidentified fusion genes exhibited an abundance below 7.557 attamoles/l, indicating the limit of sensitivity for fusion-gene discovery in this experiment.

[0488] We next plotted the coverage across the fusion junction relative to the known concentration of the fusion genes within the Mixture. We observed a linear relationship, with a Pearson's correlation of 0.9652 and a slope of 1.166, indicating that the fusion gene coverage provides a suitable measure of fusion gene expression (see FIG. 40). Using the synthetic fusion genes as a measure, we found that ˜21 reads aligns to FG1_12_P2 fusion gene, which is similar to ˜16 reads that align to BCR-ABL gene in the K562 RNA sample, indicating expression of this fusion gene to be low in the accompanying sample (where the K562 RNA is diluted at ˜10%) to be ˜1.6 attomoles/μl.

### Example 62

[0489] One example method of using synthetic standards mimicking germline variation was performed as follows. Germline variation in the diploid human genome occurs at largely homozygous and heterozygous allele frequencies. Homozygous genotypes can be represented by a single DNA standard, whilst heterozygous variation, that comprises two alleles at equal frequency, requires two DNA standards. More than two alleles may exist in a population, and a new DNA standard is required to represent each allele. However, because the human genome is diploid (i.e. there are two copies of each autosomal chromosome), only two standards will be required at any one time to mimick the diploid genome of an individual human.

[0490] To demonstrate this, we combined DNA standards representing 138 alternative single nucleotide variants (SNVs) at equal (i.e. heterozygous) or single (i.e. homozygous) concentration. The DNA standards were pooled using an epMotion 5070 epBlue™ software program to make the final mixtures robotically. We then added the DNA standards to genomic DNA extracted from the GM12878 human cell line. DNA was extracted from GM12878 and mouse using a monophasic solution of phenol and guanidium isothiocyanate sold under the name TRIZOL™ (Invitrogen) according to the manufacturer's instructions. The Nextera XT Sample Prep Kit (Illumina®) was used to prepare DNA libraries according to manufacturer's instructions. Prepared libraries were quantified on Qubit (Invitrogen) and verified on Agilent 2100 Bioanalyzer with an Agilent High Sensitivity DNA Kit (Agilent Technologies). Libraries were sequenced on a DNA sequencing machine sold under the name HISEQ™ 2500 (Illumina®) at the Kinghorn Centre for Clinical Genomics. We then aligned sequenced reads to both the human genome (hg38) and the synthetic chromosome using BWA MEM (Li and Durbin 2009) with default parameters. Resultant alignments were then analyzed using the Genome Analysis Toolkit (GATK) according to best practices. At 30-fold coverage, we identified 89% of homozygous and 71% of heterozygous SNPs in the synthetic chromosome (FIG. 41A). Note that this sensitivity of variant detection was similar to the accompanying NA12878 genome, for which we identified 86% of homozygous and 63% of heterozygous SNPs by comparison to previously described variant annotations (Zook, J. M. et al., 2014).

### Example 63

[0491] One example method of using synthetic standards mimicking somatic mutations was performed as follows. Somatic mutations can underpin numerous conditions, with tumorigenic mutations in cancer being foremost among them. Unlike germ-line mutations, which are either homozygous or heterozygous and exist in all cells of a given individual, somatic mutations may be present in just a fraction of cells (a sub-clonal population) within a tumor sample and may also be confounded by frequent rearrangements and copy number variations in tumor genomes. For example, a tumor may be comprised of multiple clonal cell populations that have distinct genotypes according to their lineage. As a result, somatic mutations can be present across a wide range of different frequencies.

[0492] To demonstrate the use of DNA standards representing 138 somatic mutations across a range of frequencies, we combined DNA standards across a two-fold serial dilution relative to reference alleles to establish a scale of allele frequencies from 1:2 (i.e. heterozygous) to 1:4096 (FIG. 42A). DNA standards were prepared, mixed and added to the NA12878 genome DNA and sequenced using methods described in Example 62. Libraries were sequenced on a DNA sequencing machine sold under the name HISEQ™ 2500 (Illumina®) at the Kinghorn Centre for Clinical Genomics. We then aligned sequenced reads to both the human genome (hg38) and the synthetic chromosome using BWA MEM (Li and Durbin 2009) with default parameters. Resultant alignments were then analyzed using VarScan2 (Koboldt et al. 2009) with default parameters to identify genetic variation represented by the DNA standards, and quantify their relative frequency (i.e. the variant allele frequency).

[0493] We plotted the known concentration of the variants, relative to their measured frequency (FIG. 42B). This indicated the accuracy with which variants are identified at different allele frequencies, with the correlation between the expected concentration and the measured abundance indicating the quantitative accuracy with which we measure variant allele frequency, and the limit of sensitivity with which we can identify variants and measure their frequency with accuracy. The scale of allele frequencies provides a reference against which the relative size of clonal sub-populations within an accompanying sample can be assessed.

[0494] At a high 25,000-fold coverage, we were able to identify at least one supporting read for all except 2 variants, both of which belong to the rarest allelic fraction (1/4096; FIG. 42B). However, at this coverage, we also find >2000 potential false-positive variant calls in the DNA standards, created by sequencing and alignment errors, indicating a requirement to further filter variant candidates. Therefore, we next used the DNA standards to empirically determine the p-value (comprising a Fisher's Exact Test on the read counts supporting reference and variant alleles as performed by VarScan2) threshold according to requisite sensitivity and specificity. For example, a 1×10⁻⁶ p-value threshold provides a sensitivity of 54% and specificity of 82% for identifying somatic variants. However, applying this stringency restricts the sensitivity of the assay to an allele frequency of 1/128 (i.e. a less than 1% frequency; FIG. 42C,D).

### Example 64

[0495] One example method of using synthetic standards mimicking complex genotypes was performed as follows. More complex genotypes can be encountered in cases of chromosomal aneuploidy or when multiple individual genotypes are simultaneously sampled. For example, if we consider DNA circulating in the pregnant mother's blood we detect two overlapping genotypes, the fetus (that constitutes both maternal and paternal alleles) and the mother (that constitute two maternal alleles). Fetal alleles can be observed across a range of concentrations according to both the homozygous and heterozygous allele frequency in conjunction with the fraction of the circulating DNA that derives from the fetus (this can vary from about 1-40% of maternal circulating DNA during gestation). Allele frequencies can be further complicated by chromosomal aneuploidy, where autosomal chromosomes exist at non-diploid frequencies, such as using trisomy 21, the most common genetic congenital abnormality. For example, DNA standards that represent variants on chromosome 21 are added at a 1.5-fold higher frequency than DNA standards that represent variation on other autosomal chromosomes to emulate trisomy 21. Therefore, the allele frequency represented by the DNA standards reflects the combined (i) genotype frequency (i.e. heterozygous or homozygous) (ii) the relative abundance of fetal and maternal DNA in circulation and (iii) copy-number variation (such as chromosomal aneuploidy) in the fetal genome.

[0496] We designed 120 DNA standards that represent the constellation of fetal and maternal genotypes (both reference and variant; SEQ ID NOS: 315-434). Each standard is ˜160 nt long corresponding to the DNA fragment size typically observed in circulation. DNA standards were then combined at a range of concentrations to emulate the relative abundance of fetal and maternal DNA circulating within the pregnant mother's blood (FIG. 42E). For example, we combined the two fetal DNA standards at equal concentration to represent a heterozygous genotype, before combining these two standards at a 10% fractional concentration to the maternal DNA standards that thereby represent the remaining 90% of circulating DNA retrieved from the blood.

[0497] To further demonstrate this, we generated a simulated library (using methods described in this Example above) from the mixture of DNA standards that represented 120 different variant events. The mixture encompassed the range of 4 different genotype combinations (fetal and maternal homozygous and heterozygous) across a range of different fetal DNA loads (0, 1, 10, 25 and 50%) with the subset of DNA standards representing variation from the human chromosome 21 added at an additional 1.5-fold enrichment to emulate trisomy 21. We aligned sequenced reads to the synthetic chromosome using BWA MEM (Li and Durbin 2009) with default parameters. Resultant alignments were then analyzed using VarScan2 (Koboldt et al. 2009) with default parameters to identify genetic variation represented by the DNA standards, and quantify their relative frequency (i.e. the variant allele frequency). Plotting the expected relative to observed genotype frequencies provides a reference scale against which the fetal variants in an accompanying sample can be measured, and inform determination of the fetal genotype and chromosomal aneuploidy.

### Example 65

[0498] One example method of generating a standard by reversing a template sequence was performed as follows. In particular, the following example describes how a DNA standard was designed to emulate a substitution mutation (G>T) that occurs at 1,849 nt in the JAK2 gene (COSM12600) that causes a missense substitution (V617E) in the encoded protein and that is associated with cancer.

[0499] To generate a DNA standard, we first retrieved both the reference and variant allele along with ˜200 nt flanking sequence. To prevent homology to the original loci within the human genome, we reversed the sequence. The reversed DNA sequence for DNA standards representing the COSM12600 reference allele is described in SEQ ID NO: 435 and the variant allele is described in SEQ ID NO: 436.

[0500] We next identified sub-sequences within the DNA standards that retain significant homology to the human genome due to chance. We identified a 35 nt small region of the DNA standard sequence (TTCTGATTCCTTTTTTTTTTCATGTTTCTTAACA (SEQ ID NO: 437)) that has significant (E-value>0.01) homology. This sequence was then modified by either (i) shuffling whereby nucleotides are shuffled into a new order to remove homology (for example CTTATTTTTTTCATTCTGTTCCTATATTTTCGAT (SEQ ID NO: 438)) (ii) substitution whereby all G are substituted to C, all C are substituted to G, all A are substituted to T and all T are substituted to A (for example GAATAAAAAAAGTAAGACAAGGATATAAAAGCTA (SEQ ID NO: 439)). In this case, shuffling maintains the same nucleotide content as the original sequence, but abolishes any sequence repetitiveness, whilst substitution maintains sequence repetitiveness, but modifies nucleotide composition (however, the relative pyrimidine and purine content is maintained). The final DNA sequence for DNA standards representing the COSM12600 reference allele is described in SEQ ID NO: 440 and the variant allele is described in SEQ ID NO: 441.

[0501] We can similarly use this method to design DNA standards for any mutations. As illustrative examples, we have generated DNA standards to represent a range of mutations with clinical importance, including mutations in BRAF (COSM476; SEQ ID NO: 442, SEQ ID NO: 443), KRAS (COSM521; SEQ ID NO: 444, SEQ ID NO: 445), IDH1 (COSM28746; SEQ ID NO: 446, SEQ ID NO: 447), EGFR (COSM6224; SEQ ID NO: 448, SEQ ID NO: 449), FGFR3 (COSM715; SEQ ID NO: 450, SEQ ID NO: 451), PIK3CA (COSM775; SEQ ID NO: 452, SEQ ID NO: 453), MYD88 (COSM85940; SEQ ID NO: 454, SEQ ID NO: 455), KIT (COSM1314; SEQ ID NO: 456, SEQ ID NO: 457), CTNNB1 (COSM5664; SEQ ID NO: 458, SEQ ID NO: 459), NRAS (COSM584; SEQ ID NO: 460, SEQ ID NO: 461), DNMT3A (COSM52944; SEQ ID NO: 462, SEQ ID NO: 463) and FOXL2 (COSM33661; SEQ ID NO: 464, SEQ ID NO: 465).

### Example 66

[0502] One example method of generating a standard mimicking small or large scale genetic variation by reversing a template sequence was performed as follows. In representing a larger structural genetic event, such as a deletion or an insertion, it can be important to maintain the sequence repetitiveness and structure surrounding the mutation, since local read alignment can be highly important to allow resolution of the structure of the large variant. Therefore, the reversion and/or substitution of a template sequence to generate DNA standards presents a particularly advantageous method to represent a large structural variants and maintain the often complex architecture and repetitive sequence structure observed in natural large structural variants.

[0503] This example describes how a DNA standard was designed to emulate a 17 nt deletion (GAATTAAGAGAAGCAA (SEQ ID NO: 466); COSM6223) in the EGRF gene. We first retrieved 200 nt of sequence flanking the reference and the variant (i.e. with the 17 nt deletion) EGRF sequence. We then reversed the sequence to 3′ to 5′ and secondly substituted any nucleotides that retained homology (despite sequence reversal) to the human genome by chance. The final DNA standard sequence that represents the EGRF deletion (COSM6223) is provided in SEQ ID NO: 467 (reference) and SEQ ID NO:468 (variant).

[0504] Importantly, DNA standards that represent insertions events are required to reverse (from 3′ to 5′) not only the sequence flanking the insertion breakpoint site, but also reverse the sequence that is inserted into the breakpoint. To demonstrate this, we designed DNA standards that represent a 14 nt insertion (COSM20959) that occurs in the ERBB2 gene. In this case, we retrieved the 200 nt sequence flanking the mutation as well as the variant insertion sequence (CATACGTGATGGC (SEQ ID NO: 469)). The reference sequence and the variant sequence (containing the insertion) were then reversed, with subsequent substitution of nucleotides to any subsequences that retained homology to the human genome by chance. The final DNA standard sequence that represents the ERBB2 insertion is provided in SEQ ID NO: 470 (reference) and SEQ ID NO: 471 (variant).

[0505] As illustrative examples, we have generated DNA standard sequences to represent a range of structural variants with clinical importance, including insertions and deletions in the EGFR (COSM6223; SEQ ID NO: 472, SEQ ID NO: 473), IL7R (COSM214586; SEQ ID NO: 474, SEQ ID NO: 475), IL6ST (COSM251361; SEQ ID NO: 476, SEQ ID NO: 477), KIT (COSM1326; SEQ ID NO: 478, SEQ ID NO: 479) genes.

[0506] Those skilled in the art will appreciate that the disclosure described herein is susceptible to variations and modifications other than those specifically described. It is to be understood that the disclosure includes all such variations and modifications. The disclosure also includes all of the steps, features, compositions and compounds referred to or indicated in this specification, individually or collectively, and any and all combinations or any two or more of said steps or features. It will be appreciated by persons skilled in the art that numerous variations and/or modifications may be made to the above-described embodiments, without departing from the broad general scope of the present disclosure. The present embodiments are, therefore, to be considered in all respects as illustrative and not restrictive. Functionally-equivalent products, compositions and methods are clearly within the scope of the disclosure, as described herein.

### Tables

TABLE 1
Concentration of individual RNA Standards added to form Mixture
A and B. Quantitative difference between Mixtures also indicated.

| | | | | Expected | |
|---|---|---|---|---|---|
| | | Concentration | Concentration | Fold- | |
| | | In Mix A | In Mix B | Change | Log2 |
| SEQ ID | Internal Id | (Attomoles/ul) | (Attomoles/ul) | Ratio | (Mix A/Mix B) |
| 1 | R_1_1_R | 10000 | 2500 | 4.00 | 2.00 |
| 2 | R_1_1_V | 10000 | 2500 | 4.00 | 2.00 |
| 3 | R_1_2_R | 15000 | 1250 | 12.00 | 3.58 |
| 4 | R_1_2_V | 5000 | 3750 | 1.33 | 0.42 |
| 5 | R_1_3_R | 5000 | 3750 | 1.33 | 0.42 |
| 6 | R_1_3_V | 15000 | 1250 | 12.00 | 3.58 |
| 7 | R_1_4_V | 15000 | 15000 | 1.00 | 1.00 |
| 8 | R_2_1_R | 625 | 312.5 | 2.00 | 1.00 |
| 9 | R_2_1_V | 625 | 312.5 | 2.00 | 1.00 |
| 10 | R_2_2_R | 312.5 | 468.75 | 0.67 | −0.58 |
| 11 | R_2_2_V | 937.5 | 156.25 | 6.00 | 2.58 |
| 12 | R_2_3_R | 937.5 | 156.25 | 6.00 | 2.58 |
| 13 | R_2_3_V | 312.5 | 468.75 | 0.67 | −0.58 |
| 14 | R_2_4_R | 1250 | 625 | 2.00 | 1.00 |
| 15 | R_3_1_R | 156.25 | 78.125 | 2.00 | 1.00 |
| 16 | R_3_1_V | 156.25 | 78.125 | 2.00 | 1.00 |
| 17 | R_3_2_R | 78.125 | 117.1875 | 0.67 | −0.58 |
| 18 | R_3_2_V | 234.375 | 39.0625 | 6.00 | 2.58 |
| 19 | R_3_3_R | 234.375 | 39.0625 | 6.00 | 2.58 |
| 20 | R_3_3_V | 78.125 | 117.1875 | 0.67 | −0.58 |
| 21 | R_4_1_R | 58.59375 | 9.765625 | 6.00 | 2.58 |
| 22 | R_4_1_V | 19.53125 | 29.296875 | 0.67 | −0.58 |
| 23 | R_4_2_R | 39.0625 | 19.53125 | 2.00 | 1.00 |
| 24 | R_4_2_V | 39.0625 | 19.53125 | 2.00 | 1.00 |
| 25 | R_4_3_R | 19.53125 | 29.296875 | 0.67 | −0.58 |
| 26 | R_4_3_V | 58.59375 | 9.765625 | 6.00 | 2.58 |
| 27 | R_5_1_R | 4.8828125 | 14.6484375 | 0.33 | −1.58 |
| 28 | R_5_1_V | 14.6484375 | 4.8828125 | 3.00 | 1.58 |
| 29 | R_5_2_R | 14.6484375 | 4.8828125 | 3.00 | 1.58 |
| 30 | R_5_2_V | 4.8828125 | 14.6484375 | 0.33 | −1.58 |
| 31 | R_5_3_R | 19.53125 | 19.53125 | 1.00 | 0.00 |
| 32 | R_6_1_R | 2.44140625 | 2.44140625 | 1.00 | 0.00 |
| 33 | R_6_1_V | 2.44140625 | 2.44140625 | 1.00 | 0.00 |
| 34 | R_6_2_R | 1.220703125 | 3.662109375 | 0.33 | −1.58 |
| 35 | R_6_2_F | 3.662109375 | 1.220703125 | 3.00 | 1.58 |
| 36 | R_6_3_R | 3.662109375 | 1.220703125 | 3.00 | 1.58 |
| 37 | R_6_3_V | 1.220703125 | 3.662109375 | 0.33 | −1.58 |
| 38 | R_7_1_R | 0.915527344 | 0.305175781 | 3.00 | 1.58 |
| 39 | R_7_1_V | 0.305175781 | 0.915527341 | 0.33 | −1.58 |
| 40 | R_7_2_R | 0.610351563 | 0.610351563 | 1.00 | 0.00 |
| 41 | R_7_2_V | 0.610351563 | 0.610351563 | 1.00 | 0.00 |
| 42 | R_7_3_R | 0.305175781 | 0.915527344 | 0.33 | −1.58 |
| 43 | R_7_3_V | 0.915527344 | 0.305175781 | 3.00 | 1.58 |
| 44 | R_1_4_R | 0.305175781 | 0.610351563 | 0.50 | −1.00 |
| 45 | R_8_1_R | 0.152587891 | 0.305175781 | 0.50 | −1.00 |
| 46 | R_8_1_V | 0.152587891 | 0.305175784 | 0.50 | −1.00 |
| 47 | R_8_2_R | 0.076293945 | 0.457763672 | 0.17 | −2.58 |
| 48 | R_8_2_V | 0.228881836 | 0.152587891 | 1.50 | 0.58 |
| 49 | R_8_3_R | 0.228881836 | 0.152587891 | 1.50 | 0.58 |
| 50 | R_8_3_V | 0.076293945 | 0.457763672 | 0.17 | −2.58 |
| 51 | R_9_1_R | 0.038146973 | 0.076293945 | 0.50 | −1.00 |
| 52 | R_9_1_V | 0.038146973 | 0.076293945 | 0.50 | −1.00 |
| 53 | R_9_2_R | 0.049073486 | 0.114440918 | 0.17 | −2.58 |
| 54 | R_9_2_V | 0.057220459 | 0.038146973 | 1.50 | 0.58 |
| 55 | R_9_3_R | 0.057220459 | 0.038146973 | 1.50 | 0.58 |
| 56 | R_9_3_V | 0.019073486 | 0.114440918 | 0.17 | −2.58 |
| 57 | R_10_1_R | 2500 | 625 | 4.00 | 2.00 |
| 58 | R_10_1_V | 2500 | 625 | 4.00 | 2.00 |
| 59 | R_10_2_R | 1250 | 937.5 | 1.33 | 0.42 |
| 60 | R_10_2_F | 3750 | 312.5 | 12.00 | 3.58 |
| 61 | R_10_3_R | 3750 | 312.5 | 12.00 | 3.58 |
| 62 | R_10_3_V | 1250 | 937.5 | 1.33 | 0.42 |

TABLE 2
Analysis of libraries comprising RNA Standards with accompanying RNA sample. Statistics determined
from the alignment, assembly and quantification of both RNA standards and endogenous genes.

| Library | | | | | | | | | | |
|---|---|---|---|---|---|---|---|---|---|---|
| RNA Standards | Simulated | | RNA Standards | | K562 | | GM12878 | | Mouse Liver | |
| Mixture | Rep1 | | Flat | | MixA | | MixB | | MixA | |
| Overview | | | | | | | | | | |
| Reads to | 1,000,000 | | 22,025,286 | | 2,183,367 | | 1,412,061 | | 225,787 | |
| Genome | | | | | | | | | | |
| Reads to | 9,000,000 | | 0 | | 131,557,592 | | 88,572,155 | | 14,983,308 | |
| Artificial | | | | | | | | | | |
| Fraction | 0.1000 | | 1.0000 | | 0.0163 | | 0.0157 | | 0.0148 | |
| Dilution | | | | | | | | | | |
| Alignment | Sn | Sp | Sn | Sp | Sn | Sp | Sn | Sp | Sn | Sp |
| All Alignments | 0.98 | 0.99 | 0.98 | 0.96 | 0.81 | 0.84 | 0.89 | 0.83 | 0.64 | 0.86 |
| Spliced | 0.99 | 0.99 | 0.99 | 0.93 | 0.86 | 0.85 | 0.92 | 0.82 | 0.72 | 0.94 |
| Alignments | | | | | | | | | | |
| Detection Limit | — | — | — | — | 0.0796 | — | 0.0018 | — | 0.0181 | — |
| Assembly | | | | | | | | | | |
| Base level | 0.89 | 1.00 | 0.86 | 1.00 | 0.71 | 0.95 | 0.75 | 0.95 | 0.56 | 0.97 |
| Exon level | | 0.99 | 0.80 | 0.98 | 0.70 | 0.77 | 0.75 | 0.79 | 0.60 | 0.86 |
| Intron level | | 1.00 | 0.79 | 1.00 | 0.72 | 0.95 | 0.77 | 0.98 | −0.63 | 0.98 |
| Intron chain | | 0.89 | 0.67 | 0.66 | 0.40 | 0.38 | 0.50 | 0.48 | 0.40 | 0.50 |
| level | | | | | | | | | | |
| Locus level | | 0.65 | 0.72 | 0.59 | 0.53 | 0.21 | 0.59 | 0.23 | 0.47 | 0.33 |
| Missed exons | 0.08 | | 0.16 | — | 0.22 | — | 0.17 | — | 0.35 | — |
| Missed Introns | 0.06 | | 0.18 | — | 0.19 | — | 0.17 | — | 0.33 | — |
| Missed Loci | 0.00 | | 0.06 | — | 0.22 | — | 0.13 | — | 0.34 | — |
| Expression | | | | | | | | | | |
| Gene | — | — | — | — | 0.95 | — | 0.95 | — | 0.94 | — |
| Correlation | | | | | | | | | | |
| Slope | — | — | — | — | 0.91 | — | 0.96 | — | 0.91 | — |
| Y-int | — | — | — | — | 1.53 | — | 1.66 | — | 1.45 | — |
| Isoform | — | — | — | — | 0.93 | — | 0.87 | — | 0.93 | — |
| Correlation | | | | | | | | | | |
| Slope | — | — | — | — | 0.86 | — | 0.84 | — | 0.83 | — |
| Y-int | — | — | — | — | −1.08 | — | 2.16 | — | 1.63 | — |
| Alt. Splicing | — | — | — | — | 0.64 | — | 0.49 | — | 0.57 | — |
| Correlation | | | | | | | | | | |
| Slope | — | — | — | — | 0.84 | — | 0.62 | — | 0.78 | — |

| Library | | | | | | | | |
|---|---|---|---|---|---|---|---|---|
| RNA Standards | Lung Normal | | Lung Cancer | | Lung Normal | | Lune Cancer | |
| Mixture | MixB | | MixA | | ERCC Mix 1 | | ERCC Mix 2 | |
| Overview | | | | | | | | |
| Reads to | 46.351 | | 189,582 | | 364,269 | | 200,078 | |
| Genome | | | | | | | | |
| Reads to | 48,348,495 | | 81,862,028 | | 82,051,730 | | 48,394,966 | |
| Artificial | | | | | | | | |
| Fraction | 0.0010 | | 0.0023 | | 0.0044 | | 0.0041 | |
| Dilution | | | | | | | | |
| Alignment | Sn | Sp | Sn | Sp | Sn | Sp | Sn | Sp |
| All Alignments | 0.57 | 0.78 | 0.63 | 0.80 | 0.84 | 0.99 | 0.78 | 0.99 |
| Spliced | 0.61 | 0.84 | 0.70 | 0.84 | — | — | — | — |
| Alignments | | | | | | | | |
| Detection Limit | 0.0049 | — | 0.0112 | — | | | | |
| Assembly | | | | | | | | |
| Base level | 0.47 | 0.92 | 0.51 | 0.92 | — | — | — | — |
| Exon level | 0.45 | 0.67 | 0.53 | 0.73 | — | — | — | — |
| Intron level | 0.49 | 0.92 | 0.56 | 0.94 | — | — | — | — |
| Intron chain | 0.28 | 0.35 | 0.33 | 0.42 | — | — | — | — |
| level | | | | | | | | |
| Locus level | 0.38 | 0.18 | 0.41 | 0.19 | — | — | — | — |
| Missed exons | 0.48 | — | 0.42 | — | — | — | — | — |
| Missed Introns | 0.43 | — | 0.22 | — | — | — | — | — |
| Missed Loci | 0.34 | — | 0.25 | — | — | — | — | — |
| Expression | | | | | | | | |
| Gene | 0.90 | — | 0.93 | — | 0.95 | — | 0.92 | — |
| Correlation | | | | | | | | |
| Slope | 0.92 | — | 0.94 | — | 0.92 | — | 0.89 | — |
| Y-int | 1.73 | — | 1.38 | — | 1.42 | — | 1.45 | — |
| Isoform | 0.73 | — | 0.90 | — | — | — | — | — |
| Correlation | | | | | | | | |
| Slope | 0.75 | — | 0.86 | — | — | — | — | — |
| Y-int | −1.08 | — | 1.53 | — | — | — | — | — |
| Alt. Splicing | 0.20 | — | 0.78 | — | — | — | — | — |
| Correlation | | | | | | | | |
| Slope | 0.52 | — | 0.97 | — | — | — | — | — |

TABLE 3
Analysis of RNA Standards between Mixture A and Mixture
B measures quantitative accuracy of fold changes
in gene expression and alternative splicing.

| | | 3 × Lung Normal |
|---|---|---|
| Sample (with Mixture A) vs. | 3 × K562 vs. | vs. 3 × Lung |
| Sample (with Mixture B) | 3 × GM12878 | Adenocarcinoma |
| Gene Fold Change | | |
| Correlation | 0.703 | 0.611 |
| Slope | 0.881 | 0.786 |
| Y-int | 0.529 | −1.020 |
| Isofrom Fold Change | | |
| Correlation | 0.850 | 0.670 |
| Slope | 0.750 | 0.450 |
| Y-int | −1.080 | 0.352 |

TABLE 4
Using RNA and DNA standards with genomes from a rance of different organisms. Indicated statistics
determined from the alignment of sequenced reads to the in silico chromosome in the presence
of reference genomes that represent the majority of taxa Sn - Senstivity, Sp - Specificity

| Taxa | Human | Mouse | Fish | Fly | Worm | Plant | Yeast | Bacteria | Archaea |
|---|---|---|---|---|---|---|---|---|---|
| Genome | hg19 | mm10 | danRer7 | dm3 | ce10 | tair9 | Sacer6 | eschColiK12 | methKand1 |
| RNA Standards | | | | | | | | | |
| Chr Sp. | 0.999 | 0.995 | 0.995 | 0.992 | 0.996 | 1.000 | 0.999 | 0.999 | 0.999 |
| Base Sn. | 0.992 | 0.992 | 0.992 | 0.992 | 0.992 | 0.992 | 0.992 | 0.992 | 0.992 |
| Base Sp. | 0.981 | 0.983 | 0.982 | 0.979 | 0.972 | 0.977 | 0.971 | 0.983 | 0.982 |
| Splice Sn. | 0.997 | 0.997 | 0.997 | 0.997 | 0.997 | 0.997 | 0.997 | 0.997 | 0.997 |
| Splice Sp. | 0.942 | 0.942 | 0.942 | 0.942 | 0.942 | 0.942 | 0.942 | 0.942 | 0.942 |
| DNA Standards | | | | | | | | | |
| Chr Sp. | 0.999 | 0.999 | 0.999 | 0.999 | 0.999 | 0.999 | 0.999 | 0.999 | 0.999 |
| Base Sn. | 0.989 | 0.989 | 0.989 | 0.989 | 0.989 | 0.989 | 0.989 | 0.989 | 0.989 |
| Base Sn. | 0.987 | 0.980 | 0.984 | 0.987 | 0.982 | 0.0987 | 0.983 | 0.992 | 0.993 |

TABLE 5
Concentration of individual DNA Standards added to form Mixture
A and B. Quantitative difference between Mixtures also indicated

| | | | | Expected | |
|---|---|---|---|---|---|
| | | Concentration | Concentration | Fold-Change | Log2 |
| SEQ ID | Internal Id | In Mix A | In Mix B | Ratio | (Mix A/Mix B) |
| 63 | D_1_1_R | 1.52 | 4.57 | 0.30 | −1.60 |
| 64 | D_1_1_V | 1.52 | 4.57 | 0.30 | −1.60 |
| 65 | D_1_2_R | 123.46 | 370.37 | 0.30 | −1.60 |
| 66 | D_1_2_V | 123.46 | 370.37 | 0.30 | −1.60 |
| 67 | D_1_3_R | 41.15 | 123.46 | 0.30 | −1.60 |
| 68 | D_1_3_V | 41.15 | 123.46 | 0.30 | −1.60 |
| 69 | D_1_4_R | 13.72 | 13.72 | 1.00 | 0.00 |
| 70 | D_1_4_V | 13.72 | 13.72 | 1.00 | 0.00 |
| 71 | D_1_5_R | 4.57 | 1.52 | 3.00 | 1.60 |
| 72 | D_1_5_V | 4.57 | 1.52 | 3.00 | 1.60 |
| 73 | D_1_6_R | 10,000.00 | 10,000.00 | 1.00 | 0.00 |
| 74 | D_1_6_V | 10,000.00 | 10,000.00 | 1.00 | 0.00 |
| 75 | D_1_7_R | 0.51 | 0.06 | 9.00 | 3.20 |
| 76 | D_1_7_V | 0.51 | 0.06 | 9.00 | 3.20 |
| 77 | D_1_8_R | 0.17 | 0.51 | 0.30 | −1.60 |
| 78 | D_1_8_V | 0.17 | 0.51 | 0.30 | −1.60 |
| 79 | D_1_9_R | 74.07 | 24.69 | 3.00 | 1.60 |
| 80 | D_1_9_V | 8.23 | 222.22 | 0.00 | −4.80 |
| 81 | D_1_10_V | 3,333.33 | 1,111.11 | 3.00 | 1.60 |
| 82 | D_1_10_V | 3,333.33 | 1,111.11 | 3.00 | 1.60 |
| 83 | D_1_11_R | I,111.11 | 3,333.33 | 0.30 | −1.60 |
| 84 | D_1_11_V | 1,111.11 | 3,333.33 | 0.30 | −1.60 |
| 85 | D_1_12_V | 370.37 | 41.15 | 9.00 | 3.20 |
| 86 | D_1_12_V | 370.37 | 41.15 | 9.00 | 3.20 |
| 87 | D_2_1_R | 0.30 | 8.23 | 0.00 | −4.80 |
| 88 | D_2_1_V | 2.74 | 0.91 | 3.00 | 1.60 |
| 89 | D_2_2_R | 24.69 | 666.67 | 0.00 | −4.80 |
| 90 | D_2_2_V | 222.22 | 74.07 | 3.00 | 1.60 |
| 91 | D_2_3_R | 0.06 | 0.17 | 0.30 | −1.60 |
| 92 | D_2_3_V | 0.06 | 0.17 | 0.30 | −1.60 |
| 93 | D_2_4_R | 2.74 | 24.69 | 0.10 | −3.20 |
| 94 | D_2_4_V | 24.69 | 2.74 | 9.00 | 3.20 |
| 95 | D_2_5_R | 8.23 | 0.30 | 27.00 | 4.80 |
| 96 | D_2_5_V | 0.91 | 2.74 | 0.30 | −1.60 |
| 97 | D_2_6_R | 2,000.00 | 18,000.00 | 0.10 | −3.20 |
| 98 | D_2_6_V | 18,000.00 | 2,000.00 | 9.00 | 3.20 |
| 99 | D_2_7_R | 0.91 | 0.01 | 81.00 | 6.30 |
| 100 | D_2_7_V | 0.10 | 0.10 | 1.00 | 0.00 |
| 101 | D_2_8_R | 0.03 | 0.91 | 0.00 | −4.80 |
| 102 | D_2_8_V | 0.30 | 0.10 | 3.00 | 1.60 |
| 103 | D_2_9_R | 2.47 | 733.33 | 0.00 | −8.20 |
| 104 | D_2_9_V | 244.44 | 7.41 | 33.00 | 5.00 |
| 105 | D_2_10_R | 6,000.00 | 222.22 | 27.00 | 4.80 |
| 106 | D_2_10_V | 666.67 | 2,000.00 | 0.30 | −1.60 |
| 107 | D_2_11_R | 222.22 | 6,000.00 | 0.00 | −4.80 |
| 108 | D_2_11_V | 2,000.00 | 666.67 | 3.00 | 1.60 |
| 109 | D_2_12_R | 666.67 | 8.23 | 81.00 | 6.30 |
| 110 | D_2_12_V | 74.07 | 74.07 | 1.00 | 0.00 |
| 111 | D_3_1_R | 0.03 | 9.05 | 0.00 | −8.20 |
| 112 | D_3_1_V | 3.02 | 0.09 | 33.00 | 5.00 |
| 113 | D_3_2_R | 0.10 | 0.03 | 3.00 | 1.60 |
| 114 | D_3_2_V | 0.01 | 0.30 | 0.00 | −4.80 |
| 115 | D_3_3_R | 81.48 | 2.47 | 33.00 | 5.00 |
| 116 | D_3_3_V | 0.82 | 244.44 | 0.00 | −8.20 |
| 117 | D_3_4_R | 0.27 | 27.16 | 0.00 | −6.60 |
| 118 | D_3_4_F | 27.16 | 0.27 | 99.00 | 6.60 |
| 119 | D_3_5_R | 9.05 | 0.03 | 297.00 | 8.20 |
| 120 | D_3_5_V | 0.09 | 3.02 | 0.00 | −5.00 |
| 121 | D_3_6_R | 200.00 | 19,800.00 | 0.00 | −6.60 |
| 122 | D_3_6_V | 19,800.00 | 200.00 | 99.00 | 6.60 |
| 123 | D_3_7_R | 1.01 | 0.00 | 891.00 | 9.80 |
| 124 | D_3_7_V | 0.01 | 0.11 | 0.10 | −3.50 |
| 125 | D_3_8_R | 0.00 | 1.01 | 0.00 | −8.20 |
| 126 | D_3_8_V | 0.34 | 0.01 | 33.00 | 5.00 |
| 127 | D_3_9_R | 6,600.00 | 22.22 | 297.00 | 8.20 |
| 128 | D_3_9_V | 66.67 | 2,200.00 | 0.00 | −5.00 |
| 129 | D_3_10_R | 0.11 | 0.00 | 33.00 | 5.00 |
| 130 | D_3_10_V | 0.00 | 0.34 | 0.00 | −8.20 |
| 131 | D_3_11_R | 22.22 | 6,600.00 | 0.00 | −8.20 |
| 132 | D_3_11_V | 2,200.00 | 66.67 | 33.00 | 5.00 |
| 133 | D_3_12_R | 733.33 | 0.82 | 891.00 | 9.80 |
| 134 | D_3_12_V | 7.41 | 81.48 | 0.10 | −3.50 |

TABLE 6
Analysis of libraries comprising DNA Standards with accompanying genome DNA sample. Statistics determined
from the alignment, assembly and quantification of both DNA standards and endogenous genomes are indicated.

| Library | | DNA | | Mouse | Lung | Lung | Structural |
|---|---|---|---|---|---|---|---|
| DNA Standards | Simulated | Standards | GM12878 | Liver | Normal | Cancer | Variants |
| Mixture | Flat | Flat | MixA | MixA | MixA | MixB | Flat |
| Overview | | | | | | | |
| Reads to | — | — | 458521347 | 11799567 | 221843673 | 233622706 | 458521347 |
| Genome | | | | | | | |
| Reads to | 4000000 | 123408715 | 2029597 | 538524 | 1532753 | 2119754 | 22291561 |
| Artificial | | | | | | | |
| Fraction | — | — | 0.004 | 0.046 | 0.009 | 0.009 | 0.007 |
| Dilution | | | | | | | |
| Alignment | | | | | | | |
| Sensitivity | 0.994 | 0.997 | 0.849 | 0.789 | 0.823 | 0.854 | 0.916 |
| Specificity | 1.000 | 0.975 | 0.961 | 0.958 | 0.980 | 0.984 | 0.943 |
| Variation | | | | | | | |
| Covered | 1.000 | 1.000 | 0.880 | 0.720 | 0.890 | 0.910 | — |
| Detection | 1.000 | 1.000 | 0.650 | 0.570 | 0.730 | 0.780 | — |
| Sensitivity | | | | | | | |
| Efficiency | 1.000 | 1.000 | 0.730 | 0.680 | 0.780 | 0.810 | — |
| Specificity | 1.000 | 0.780 | 0.570 | 0.410 | 0.650 | 0.710 | — |
| Aundunce | | | | | | | |
| Correlation | — | — | 0.949 | 0.967 | 0.980 | 0.990 | — |
| Slope | — | — | 0.910 | 0.950 | 1.030 | 1.010 | — |
| Detection | — | — | 0.004 | 0.012 | 0.002 | 0.002 | — |
| Limit | | | | | | | |

TABLE 7
Multiple individual DNA standards can be ligated together to form conjoined DNA standards. The
analysis of dependent and independent variation between multiple individual DNA standards that
are ligated together enables the discernment of pipetting error and other error sources. Indicated
are the designs of conjoined DNA standards and the calculation of pipetting, other error.

| DNA | Conj. | | Copy | Exp. | Pip. | Other | Obs. | Conj. | Norm. | Pip. | Other | Obs. |
|---|---|---|---|---|---|---|---|---|---|---|---|---|
| ID | Group | Conc. | No. | Abun. | Error | Error | Abun. | Slope | Abun. | Error | Error | Abun. |
| 43 | H | 8 | 1 | 8 | 1.12 | 0.99 | 8.83 | 1.12 | 7.92 | 1.12 | 0.99 | 8.74 |
| 44 | H | 8 | 2 | 16 | 1.12 | 0.98 | 17.60 | 1.12 | 15.78 | 1.03 | 0.98 | 15.96 |
| 45 | H | 8 | 3 | 24 | 1.12 | 1.01 | 27.17 | 1.12 | 24.37 | 1.12 | 1.01 | 27.60 |
| 46 | H | 8 | 4 | 32 | 1.12 | 1.00 | 35.85 | 1.12 | 32.15 | 1.15 | 1.00 | 37.10 |
| 47 | H | 8 | 5 | 40 | 1.12 | 1.00 | 44.84 | 1.12 | 40.22 | 1.15 | 1.00 | 46.44 |
| 48 | H | 8 | 6 | 48 | 1.12 | 1.00 | 53.56 | 1.12 | 48.03 | 1.14 | 1.00 | 54.47 |
| 49 | I | 9 | 1 | 9 | 1.15 | 1.02 | 10.54 | 1.15 | 9.15 | 0.84 | 1.02 | 7.83 |
| 50 | I | 9 | 2 | 18 | 1.15 | 0.98 | 20.40 | 1.15 | 17.71 | 1.15 | 0.98 | 20.08 |
| 51 | I | 9 | 3 | 27 | 1.15 | 1.00 | 31.22 | 1.15 | 27.10 | 0.98 | 1.00 | 26.68 |
| 52 | I | 9 | 4 | 36 | 1.15 | 1.00 | 41.38 | 1.15 | 35.92 | 0.88 | 1.00 | 31.63 |
| 53 | I | 9 | 5 | 45 | 1.15 | 1.01 | 52.10 | 1.15 | 45.23 | 1.15 | 1.01 | 52.37 |
| 54 | I | 9 | 6 | 54 | 1.15 | 1.00 | 61.90 | 1.15 | 53.74 | 0.88 | 1.00 | 47.20 |
| 55 | J | 10 | 1 | 10 | 0.88 | 1.00 | 8.83 | 0.89 | 9.97 | 1.12 | 1.00 | 11.15 |
| 56 | J | 10 | 2 | 20 | 0.88 | 0.98 | 17.36 | 0.89 | 19.60 | 1.15 | 0.98 | 22.20 |
| 57 | J | 10 | 3 | 30 | 0.88 | 1.01 | 26.78 | 0.89 | 30.24 | 1.06 | 1.01 | 32.24 |
| 58 | J | 10 | 4 | 40 | 0.88 | 1.02 | 35.92 | 0.89 | 40.56 | 1.19 | 1.02 | 48.96 |
| 59 | J | 10 | 5 | 50 | 0.88 | 1.00 | 44.01 | 0.89 | 49.70 | 1.03 | 1.00 | 50.98 |
| 60 | J | 10 | 6 | 60 | 0.88 | 1.01 | 53.53 | 0.89 | 60.45 | 1.15 | 1.01 | 70.39 |
| 61 | K | 11 | 1 | 11 | 0.88 | 1.00 | 9.66 | 0.88 | 10.93 | 1.19 | 1.00 | 12.91 |
| 62 | K | 11 | 2 | 22 | 0.88 | 0.98 | 19.08 | 0.88 | 21.59 | 0.77 | 0.98 | 16.27 |
| 63 | K | 11 | 3 | 33 | 0.88 | 1.02 | 29.58 | 0.88 | 33.47 | 0.88 | 1.02 | 30.00 |
| 64 | K | 11 | 4 | 44 | 0.88 | 1.01 | 39.27 | 0.88 | 44.44 | 1.15 | 1.01 | 51.76 |
| 65 | K | 11 | 5 | 55 | 0.88 | 0.99 | 47.90 | 0.88 | 54.20 | 0.98 | 0.99 | 52.41 |
| 66 | K | 11 | 6 | 66 | 0.88 | 1.02 | 59.22 | 0.88 | 67.01 | 1.03 | 1.02 | 70.07 |
| 67 | L | 12 | 1 | 12 | 0.77 | 0.98 | 9.06 | 0.76 | 11.89 | 1.06 | 0.98 | 12.33 |
| 68 | L | 12 | 2 | 24 | 0.77 | 0.99 | 18.32 | 0.76 | 24.04 | 1.12 | 0.99 | 26.74 |
| 69 | L | 12 | 3 | 30 | 0.77 | 1.01 | 27.92 | 0.76 | 36.64 | 1.15 | 1.01 | 42.67 |
| 70 | L | 12 | 4 | 48 | 0.77 | 0.98 | 36.25 | 0.76 | 47.57 | 0.88 | 0.98 | 41.33 |
| 71 | L | 12 | 5 | 60 | 0.77 | 0.98 | 45.27 | 0.76 | 59.41 | 0.77 | 0.98 | 44.82 |
| 72 | L | 12 | 6 | 72 | 0.77 | 1.00 | 55.34 | 0.76 | 72.63 | 1.14 | 1.00 | 82.69 |
| 73 | M | 13 | 1 | 13 | 1.12 | 1.02 | 14.79 | 1.13 | 13.09 | 1.14 | 1.02 | 15.13 |
| 74 | M | 13 | 2 | 26 | 1.12 | 1.02 | 29.60 | 1.13 | 26.19 | 0.98 | 1.02 | 26.16 |
| 75 | M | 13 | 3 | 39 | 1.12 | 1.00 | 43.77 | 1.13 | 38.73 | 0.98 | 1.00 | 38.13 |
| 76 | M | 13 | 4 | 52 | 1.12 | 1.02 | 59.09 | 1.13 | 52.29 | 0.88 | 1.02 | 46.90 |
| 77 | M | 13 | 5 | 65 | 1.12 | 1.01 | 73.60 | 1.13 | 65.13 | 1.15 | 1.01 | 75.97 |
| 78 | M | 13 | 6 | 78 | 1.12 | 1.00 | 87.03 | 1.13 | 77.02 | 1.14 | 1.00 | 87.34 |
| 79 | N | 14 | 1 | 14 | 1.15 | 1.02 | 16.41 | 1.16 | 14.17 | 0.77 | 1.02 | 11.06 |
| 80 | N | 14 | 2 | 28 | 1.15 | 1.00 | 32.18 | 1.16 | 27.79 | 0.84 | 1.00 | 23.31 |
| 81 | N | 14 | 3 | 42 | 1.15 | 1.00 | 48.25 | 1.16 | 41.67 | 1.06 | 1.00 | 43.81 |
| 82 | N | 14 | 4 | 56 | 1.15 | 1.00 | 64.67 | 1.16 | 55.84 | 1.19 | 1.00 | 66.62 |
| 83 | N | 14 | 5 | 70 | 1.15 | 1.00 | 80.92 | 1.16 | 69.88 | 1.19 | 1.00 | 83.21 |
| 84 | N | 14 | 6 | 84 | 1.15 | 1.02 | 98.27 | 1.16 | 84.86 | 1.06 | 1.02 | 90.86 |
| 85 | O | 15 | 1 | 15 | 0.98 | 1.00 | 14.70 | 0.98 | 15.03 | 0.77 | 1.00 | 11.54 |
| 86 | O | 15 | 2 | 30 | 0.98 | 1.01 | 29.55 | 0.98 | 30.21 | 0.98 | 1.01 | 29.78 |
| 87 | O | 15 | 3 | 45 | 0.98 | 1.01 | 44.74 | 0.98 | 45.73 | 0.98 | 1.01 | 45.47 |
| 88 | O | 15 | 4 | 60 | 0.98 | 1.00 | 58.85 | 0.98 | 60.16 | 1.12 | 1.00 | 67.32 |
| 89 | O | 15 | 5 | 75 | 0.98 | 0.99 | 72.40 | 0.98 | 74.00 | 1.15 | 0.99 | 83.96 |
| 90 | O | 15 | 6 | 90 | 0.98 | 0.98 | 86.74 | 0.98 | 88.67 | 1.19 | 0.98 | 103.76 |

TABLE 8
Analysis of libraries comprising RNA Standards with accompanying immune cell receptor clonotype
sequencing. Statistics determined from the alignment, assembly and quantification of both
DNA standards and endogenous clonotypes are indicated.

| | | Immune Receptor | | |
|---|---|---|---|---|
| | | TCRβ | TCRβ | TCRβ |
| | | Sample | | |
| | | Female A | Female B | Female C |
| Overview | | | | |
| | Genome Alignments | 2,519,121.00 | 2,921,540.00 | 3,075,138.00 |
| | In Silica Alignment | 25,191 | 29,215 | 30,751 |
| | Dilution | 0.01 | 0.01 | 0.01 |
| Assembly | | | | |
| | Limit of Detection | 0.01 | 0.01 | 0.1 |
| | Dynamic Range | 10\hat{ }6 | 10\hat{ }6 | 10\hat{ }5 |
| | Clone Sensitivity | 1 | 1 | 1 |
| Expression | | | | |
| | Correlation | 1 | 1 | 1 |
| | Slope | 1 | 1 | 1 |
| | Y-intercept | 0 | 0 | 0 |
| | Highest Clone | 81,565 | 104,654 | 178,359 |
| | Fraciton | 0.032 | 0.036 | 0.058 |

TABLE 9
Design of in silica Microbe Genomes and DNA Standards for metagenomic analysis and
16S phylogenetic profiling applications. Indicated are the source genomes and statistics
for length and GC % of in silica genomes and representative DNA standards.

| | | Artificial Microbe Genome | | | DNA Standard | | | |
|---|---|---|---|---|---|---|---|---|
| SEQ ID | Internal Id | Source Genome | Length | GC % | Start Coord. | Stop Coord. | Length | GC % |
| Meatagenome | | | | | | | | |
| Analysis | | | | | | | | |
| 149 | M1_G | enteFaec | 3218030 | 0.375 | 319803 | 323021 | 3218 | 0.381 |
| 150 | M2_G | eschColi | 4639674 | 0.508 | 461950 | 466589 | 4639 | 0.510 |
| 151 | M3_G | therPetr | 1823510 | 0.461 | 180351 | 182175 | 1824 | 0.458 |
| 152 | M4_G | fusoNucl | 2174499 | 0.272 | 867848 | 870022 | 2174 | 0.281 |
| 153 | M5_G | trepPall | 1138010 | 0.528 | 111796 | 112934 | 1138 | 0.538 |
| 154 | M6_G | saliTrop | 5183330 | 0.695 | 1034653 | 1039836 | 5183 | 0.695 |
| 155 | M7_G | methKand1 | 1694968 | 0.612 | 337010 | 338705 | 1695 | 0.604 |
| 156 | M8_G | persMariEXH1 | 1930283 | 0.372 | 191034 | 192964 | 1930 | 0.374 |
| 157 | M9_G | chioChlo | 2572078 | 0.443 | 1541252 | 1543824 | 2572 | 0.444 |
| 158 | M10_G | bactThet | 6260360 | 0.428 | 5006316 | 5012576 | 6260 | 0.432 |
| 159 | M11_G | niteMari1 | 1645258 | 0.342 | 162526 | 164171 | 1645 | 0.350 |
| 160 | M12_G | desuVulg | 3570857 | 0.631 | 712169 | 715740 | 3571 | 0.621 |
| 16S Phylogenetic | | | | | | | | |
| Profiling | | | | | | | | |
| 161 | M1_SR | enteFaec | 3218030 | 0.375 | 1018270 | 1019270 | 1000 | 0.539 |
| 162 | M2_SR | eschColi | 4639674 | 0.508 | 3246223 | 3247223 | 1000 | 0.540 |
| 163 | M3_SR | therPetr | 1823510 | 0.461 | 754164 | 755164 | 1000 | 0.586 |
| 164 | M4_SR | fusoNucl | 2174499 | 0.272 | 1072371 | 1073371 | 1000 | 0.520 |
| 165 | M5_SR | trepPall | 1138010 | 0.528 | 230163 | 231163 | 1000 | 0.534 |
| 166 | M6_SR | saliTrop | 5183330 | 0.695 | 202619 | 203619 | 1000 | 0.591 |

TABLE 10
Analysis of metagenome libraries comprising DNA Standards with accompanying environmental sample. Statistics
determined from the alignment, assembly and qualification of both DNA standards and DNA sample indicated.

| | | | | | | Watson's Creek |
|---|---|---|---|---|---|---|
| | | | | Adult Male Fecal | | Soil Samples |
| Library | | | | Fecal | Fecal | Soil 1 |
| Standards | Simulated | Standard | GC | (Rep1) | (Rep2) | (Rep1) |
| Mixture | Flat | Flat | Flat | MixA | MixA | MixA |
| Overview | | | | | | |
| Reads to | 0.00 | 0.00 | 0.00 | 225662643 | 229258092 | 76069281 |
| Genome | | | | | | |
| Reads to | 4000000 | 4000000 | 4000000 | 2014973 | 1979618 | 4317629 |
| Artificial | | | | | | |
| Fraction | — | — | — | 0.009 | 0.009 | 0.057 |
| Dilution | | | | | | |
| Base | | | | | | |
| Sensitivity | 1.00 | 0.997 | 1.000 | 0.80 | 0.82645193 | 0.80 |
| Specificity | 1.00 | 0.975 | 1.000 | 1.00 | 0.999856307 | 1.00 |
| Assembly | | | | | | |
| Fraction | 1.00 | 0.79 | 0.84 | 0.53 | 0.52 | 0.32 |
| Nodes | 36 | 50 | 10 | 14 | 17 | 20 |
| N50 | 1007 | 319 | 894 | 697 | 895 | 508 |
| Max. Contig | 1007 | 978 | 987 | 937 | 946 | 904 |
| Size | | | | | | |
| Total Bases | 1.00 | 0.35 | 0.67 | 0.15 | 0.21 | 0.22 |
| Abundance | | | | | | |
| Correlation | — | — | — | 0.47 | 0.95 | 0.96 |
| Slope | — | — | — | 1.04 | 1.04 | 1.06 |
| | | Watson's Creek Soil Samples | | | | |
| | Library | Soil 1 | Soil 1 | Soil 2 | Soil 2 | Soil 2 |
| | Standards | (Rep2) | (Rep3) | (Rep 1) | (Rep 2) | (Rep 3) |
| | Mixture | MixA | MixA | Mix B | Mix B | Mix B |
| | Overview | | | | | |
| | Reads to | 64245984 | 80676540 | 70760900 | 70054850 | 74436488 |
| | Genome | | | | | |
| | Reads to | 5151742 | 3712994 | 5165622 | 6617292 | 3486096 |
| | Artificial | | | | | |
| | Fraction | 0.080 | 0.046 | 0.073 | 0.094 | 0.047 |
| | Dilution | | | | | |
| | Base | | | | | |
| | Sensitivity | 0.78 | 0.86 | 0.83 | 0.77 | 0.86 |
| | Specificity | 1.00 | 1.00 | 1.00 | 1.00 | 1.00 |
| | Assembly | | | | | |
| | Fraction | 0.28 | 0.30 | 0.28 | 0.24 | 0.32 |
| | Nodes | 23 | 16 | 18 | 20 | 32 |
| | N50 | 409 | 465 | 658 | 675 | 706 |
| | Max. Contig | 847 | 1054 | 999 | 910 | 963 |
| | Size | | | | | |
| | Total Bases | 0.21 | 0.16 | 0.29 | 0.20 | 0.27 |
| | Abundance | | | | | |
| | Correlation | 0.95 | 0.97 | 0.95 | 0.96 | 0.95 |
| | Slope | 1.09 | 1.03 | 1.16 | 1.18 | 1.13 |

TABLE 11
Analysis of DNA Metagenome Standards between Mixture
A and Mixture B measures quantitative accuracy
of fold changes in microbe abundance.

| Sample (with Mixture A) vs. | 3 × Soil (High Carbon Content) vs. |
|---|---|
| Sample (with Mixture B) | 3 × Soil (Low Carbon content) |
| Microbe Abundance | |
| Correlation | 0.833 |
| Slope | 1.149 |

TABLE 12
Synthetic TCRG standards

| | | Forward Primer | | | |
|---|---|---|---|---|---|
| | | TRGVB | TRGVA | TRGV10 | TRGV1 |
| Alignment | | | | | |
| Number: | | | | | |
| Reverse | TRGJ1 | 117385 | 138592 | 152191 | 174702 |
| Primer | TRGJ2 | 138146 | 108388 | 115122 | 179881 |
| | TRGJP1 | 177614 | 112225 | 236343 | 352427 |
| | TRGJP | 144436 | 320182 | 189878 | 224320 |
| | TRGJP2 | 211121 | 253929 | 227857 | 316722 |
| Normalisation | | | | | |
| Factor: | | | | | |
| Reverse | TRGJ1 | 0.45198665 | 0.53364342 | 0.58600588 | 0.67268366 |
| Primer | TRGJ2 | 0.53192612 | 0.41734403 | 0.44327305 | 0.69262521 |
| | TRGJP1 | 0.68389621 | 0.43211826 | 0.91003007 | 1.35700727 |
| | TRGJP | 0.55614553 | 1.23284907 | 0.73111829 | 0.86373595 |
| | TRGJP2 | 0.81291368 | 0.97774432 | 0.87735504 | 1.21952647 |
| | | Forward Primer | | | |
| | | TRGV9 | TRGV8 | TRGV6 | TRGV11 |
| Alignment | | | | | |
| Number: | | | | | |
| Reverse | TRGJ1 | 272588 | 313671 | 313975 | 62995 |
| Primer | TRGJ2 | 238369 | 312534 | 330985 | 96303 |
| | TRGJP1 | 549125 | 529199 | 606064 | 165804 |
| | TRGJP | 457219 | 452330 | 500545 | 144469 |
| | TRGJP2 | 310073 | 368423 | 368662 | 103574 |
| Normalisation | | | | | |
| Factor: | | | | | |
| Reverse | TRGJ1 | 1.04959012 | 1.20777871 | 1.20894925 | 0.24255994 |
| Primer | TRGJ2 | 0.91783111 | 1.20340073 | 1.27444563 | 0.37081118 |
| | TRGJP1 | 2.11438572 | 2.03766138 | 2.33362725 | 0.63842223 |
| | TRGJP | 1.76050503 | 1.74168011 | 1.9273302 | 0.5562726 |
| | TRGJP2 | 1.19392474 | 1.41859928 | 1.41951954 | 0.3988079 |

### REFERENCES

[0508] Altschul, S. F., Gish, W., Miller, W., Myers, E. W. & Lipman, D. J. Basic local alignment search tool. J Mol Biol 215, 403-10 (1990).
[0509] Anders, S., D. J. McCarthy, Y. Chen, M. Okoniewski, G. K. Smyth, W. Huber and M. D. Robinson (2013). “Count-based differential expression analysis of RNA sequencing data using R and Bioconductor.” Nat Protoc 8(9): 1765-1786.
[0510] Baker, S. C. et al. The External RNA Controls Consortium: a progress report. Nat Methods 2, 731-4 (2005).
[0511] Bentley, D. R. et al. Accurate whole human genome sequencing using reversible terminator chemistry. Nature 456, 53-9 (2008).
[0512] Bernstein, B. E. et al. Genomic maps and comparative analysis of histone modifications in human and mouse. Cell 120, 169-81 (2005).
[0513] Bolotin, D. A., I. Z. Mamedov, O. V. Britanova, I. V. Zvyagin, D. Shagin, S. V. Ustyugova, M. A. Turchaninova, S. Lukyanov, Y. B. Lebedev and D. M. Chudakov “Next generation sequencing for TCR repertoire profiling: platform-specific features and correction algorithms.” Eur J Immunol 42(11): 3073-3083 (2012).
[0514] Burset, M. and R. Guigo “Evaluation of gene structure prediction programs.” Genomics 34(3): 353-367 (1996).
[0515] Carlson, C., O'Emerson, R., Sherwood, A., Desmarais, C., Chung, M-W., Parsons, J., Steen, M., A LaMadrid-Herrmannsfeldt, M., Williamson, D., Livingston, R., Wu, D., Wood, B, Rieder, M. & Robins, H. “Using synthetic templates to design an unbiased multiplex PCR assay.” Nature Communications 4, Article number 2680 (2013).
[0516] Chen, K., J. W. Wallis, M. D. McLellan, D. E. Larson, J. M. Kalicki, C. S. Pohl, S. D. McGrath, M. C. Wendl, Q. Zhang, D. P. Locke, X. Shi, R. S. Fulton, T. J. Ley, R. K. Wilson, L. Ding and E. R. Mardis (2009). “BreakDancer: an algorithm for high-resolution mapping of genomic structural variation.” Nat Methods 6(9): 677-681.
[0517] Chen, Y. C., Liu, T., Yu, C. H., Chiang, T. Y. & Hwang, C. C. Effects of GC bias in next-generation-sequencing data on de novo genome assembly. PLoS One 8, e62856 (2013).
[0518] Clarke, J. et al. Continuous base identification for single-molecule nanopore DNA sequencing. Nat Nanotechnol 4, 265-70 (2009).
[0519] Consortium, E. (2005). “Proposed methods for testing and selecting the ERCC external RNA controls.” BMC Genomics 6: 150.
[0520] Coward, E. (1999). “Shufflet: shuffling sequences while conserving the k-let counts.” Bioinformatics 15(12): 1058-1059.
[0521] Davies, H. et al. Mutations of the BRAF gene in human cancer. Nature 417, 949-54 (2002).
[0522] DePristo, M. A., E. Banks, R. Poplin, K. V. Garimella, J. R. Maguire, C. Hartl, A. A. Philippakis, G. del Angel, M. A. Rivas, M. Hanna, A. McKenna, T. J. Fennell, A. M. Kernytsky, A. Y. Sivachenko, K. Cibulskis, S. B. Gabriel, D. Altshuler and M. J. Daly (2011). “A framework for variation discovery and genotyping using next-generation DNA sequencing data.” Nat Genet 43(5): 491-498.
[0523] Dobin, A., C. A. Davis, F. Schlesinger, J. Drenkow, C. Zaleski, S. Jha, P. Batut, M. Chaisson and T. R. Gingeras (2013). “STAR: ultrafast universal RNA-seq aligner.” Bioinformatics 29(1): 15-21.
[0524] Edwards, R. A. et al. Using pyrosequencing to shed light on deep mine microbial ecology. BMC Genomics 7, 57 (2006).
[0525] Eid, J. et al. Real-time DNA sequencing from single polymerase molecules. Science 323, 133-8 (2009).
[0526] Futreal, P. A., L. Coin, M. Marshall, T. Down, T. Hubbard, R. Wooster, N. Rahman and M. R. Stratton (2004). “A census of human cancer genes.” Nat Rev Cancer 4(3): 177-183.
[0527] Grosveld, G., T. Verwoerd, T. van Agthoven, A. de Klein, K. L. Ramachandran, N. Heisterkamp, K. Stam and J. Groffen (1986). “The chronic myelocytic cell line K562 contains a breakpoint in bcr and produces a chimeric bcr/c-abl transcript.” Mol Cell Biol 6(2): 607-616.
[0528] Haas, B. J., A. Papanicolaou, M. Yassour, M. Grabherr, P. D. Blood, J. Bowden, M. B. Couger, D. Eccles, B. Li, M. Lieber, M. D. Macmanes, M. Ott, J. Orvis, N. Pochet, F. Strozzi, N. Weeks, R. Westerman, T. William, C. N. Dewey, R. Henschel, R. D. Leduc, N. Friedman and A. Regev (2013). “De novo transcript sequence reconstruction from RNA-seq using the Trinity platform for reference generation and analysis.” Nat Protoc 8(8): 1494-1512.
[0529] Harrow, J., F. Denoeud, A. Frankish, A. Reymond, C. K. Chen, J. Chrast, J. Lagarde, J. G. Gilbert, R. Storey, D. Swarbreck, C. Rossier, C. Ucla, T. Hubbard, S. E. Antonarakis and R. Guigo (2006). “GENCODE: producing a reference annotation for ENCODE.” Genome Biol 7 Suppl 1: S4 1-9.
[0530] Harrow, J., A. Frankish, J. M. Gonzalez, E. Tapanari, M. Diekhans, F. Kokocinski, B. L. Aken, D. Barrell, A. Zadissa, S. Searle, I. Barnes, A. Bignell, V. Boychenko, T. Hunt, M. Kay, G. Mukherjee, J. Rajan, G. Despacio-Reyes, G. Saunders, C. Steward, R. Harte, M. Lin, C. Howald, A. Tanzer, T. Derrien, J. Chrast, N. Walters, S. Balasubramanian, B. Pei, M. Tress, J. M. Rodriguez, I. Ezkurdia, J. van Baren, M. Brent, D. Haussler, M. Kellis, A. Valencia, A. Reymond, M. Gerstein, R. Guigo and T. J. Hubbard (2012). “GENCODE: the reference human genome annotation for The ENCODE Project.” Genome Res 22(9): 1760-1774.
[0531] Iqbal, Z., M. Caccamo, I. Turner, P. Flicek and G. McVean (2012). “De novo assembly and genotyping of variants using colored de Bruijn graphs.” Nat Genet 44(2): 226-232.
[0532] Jiang, M., J. Anderson, J. Gillespie and M. Mayne (2008). “uShuffle: a useful tool for shuffling biological sequences while preserving the k-let counts.” BMC Bioinformatics 9: 192.
[0533] Jiang, L. et al. Synthetic spike-in standards for RNA-seq experiments. Genome Res 21, 1543-51 (2011).
[0534] Johnson, D. S., Mortazavi, A., Myers, R. M. & Wold, B. Genome-wide mapping of in vivo protein-DNA interactions. Science 316, 1497-502 (2007).
[0535] Katz, Y., E. T. Wang, E. M. Airoldi and C. B. Burge (2010). “Analysis and design of RNA sequencing experiments for identifying isoform regulation.” Nat Methods 7(12): 1009-1015.
[0536] Kelley, D. R., M. C. Schatz and S. L. Salzberg (2010). “Quake: quality-aware detection and correction of sequencing errors.” Genome Biol 11(11): R116.
[0537] Kim, D., G. Pertea, C. Trapnell, H. Pimentel, R. Kelley and S. L. Salzberg (2013). “TopHat2: accurate alignment of transcriptomes in the presence of insertions, deletions and gene fusions.” Genome Biol 14(4): R36.
[0538] Koboldt, D. C. et al. (2009) “VarScan: variant detection in massively parallel sequencing of individual and pooled samples.” Bioinformatics 25: 2283-5.
[0539] Lander, E. S. et al. Initial sequencing and analysis of the human genome. Nature 409, 860-921 (2001).
[0540] Langmead, B. and S. L. Salzberg (2012). “Fast gapped-read alignment with Bowtie 2.” Nat Methods 9(4): 357-359.
[0541] Langmead, B., C. Trapnell, M. Pop and S. L. Salzberg (2009). “Ultrafast and memory-efficient alignment of short DNA sequences to the human genome.” Genome Biol 10(3): R25.
[0542] Law, J. C., Ritke, M. K., Yalowich, J. C., Leder, G. H. & Ferrell, R. E. Mutational inactivation of the p53 gene in the human erythroid leukemic K562 cell line. Leuk Res 17, 1045-50 (1993).
[0543] Li, H. and R. Durbin (2009). “Fast and accurate short read alignment with Burrows-Wheeler transform.” Bioinformatics 25(14): 1754-1760.
[0544] Li, H., B. Handsaker, A. Wysoker, T. Fennell, J. Ruan, N. Homer, G. Marth, G. Abecasis and R. Durbin (2009). “The Sequence Alignment/Map format and SAMtools.” Bioinformatics 25(16): 2078-2079.
[0545] Li, H., B. Handsaker, A. Wysoker, T. Fennell, J. Ruan, N. Homer, G. Marth, G. Abecasis, R. Durbin and S. Genome Project Data Processing (2009). “The Sequence Alignment/Map format and SAMtools.” Bioinformatics 25(16): 2078-2079.
[0546] Lieberman-Aiden, E. et al. Comprehensive mapping of long-range interactions reveals folding principles of the human genome. Science 326, 289-93 (2009).
[0547] Logan, A. C., H. Gao, C. Wang, B. Sahaf, C. D. Jones, E. L. Marshall, I. Buno, R. Armstrong, A. Z. Fire, K. I. Weinberg, M. Mindrinos, J. L. Zehnder, S. D. Boyd, W. Xiao, R. W. Davis and D. B. Miklos (2011). “High-throughput VDJ sequencing for quantification of minimal residual disease in chronic lymphocytic leukemia and immune reconstitution assessment.” Proc Natl Acad Sci USA 108(52): 21194-21199.
[0548] MacDonald, J. R., R. Ziman, R. K. Yuen, L. Feuk and S. W. Scherer (2014). “The Database of Genomic Variants: a curated collection of structural variation in the human genome.” Nucleic Acids Res 42(Database issue): D986-992.
[0549] McKenna, A., M. Hanna, E. Banks, A. Sivachenko, K. Cibulskis, A. Kernytsky, K. Garimella, D. Altshuler, S. Gabriel, M. Daly and M. A. Depristo (2010). “The Genome Analysis Toolkit: A MapReduce framework for analyzing next-generation DNA sequencing data.” Genome Res.
[0550] Meacham, F., D. Boffelli, J. Dhahbi, D. I. Martin, M. Singer and L. Pachter (2011). “Identification and correction of systematic error in high-throughput sequence data.” BMC Bioinformatics 12: 451.
[0551] Mitterbauer, G., P. Nemeth, S. Wacha, N. C. Cross, I. Schwarzinger, U. Jaeger, K. Geissler, H. T. Greinix, P. Kalhs, K. Lechner and C. Mannhalter (1999). “Quantification of minimal residual disease in patients with BCR-ABL-positive acute lymphoblastic leukaemia using quantitative competitive polymerase chain reaction.” Br J Haematol 106(3): 634-643.
[0552] Mortazavi, A., Williams, B. A., McCue, K., Schaeffer, L. & Wold, B. Mapping and quantifying mammalian transcriptomes by RNA-Seq. Nat Methods 5, 621-8 (2008).
[0553] Pearson, W. R. and D. J. Lipman (1988). “Improved tools for biological sequence comparison.” Proc Natl Acad Sci USA 85(8): 2444-2448.
[0554] Piva, F. and G. Principato (2006). “RANDNA: a random DNA sequence generator.” In Silico Biol 6(3): 253-258.
[0555] Robinson, M. D., D. J. McCarthy and G. K. Smyth (2010). “edgeR: a Bioconductor package for differential expression analysis of digital gene expression data.” Bioinformatics 26(1): 139-140.
[0556] Ronaghi, M., Uhlen, M. & Nyren, P. A sequencing method based on real-time pyrophosphate. Science 281, 363, 365 (1998).
[0557] Rothberg, J. M. et al. An integrated semiconductor device enabling non-optical genome sequencing. Nature 475, 348-52 (2011).
[0558] Schaap, M., R. J. Lemmers, R. Maassen, P. J. van der Vliet, L. F. Hoogerheide, H. K. van Dijk, N. Basturk, P. de Knijff and S. M. van der Maarel (2013). “Genome-wide analysis of macrosatellite repeat copy number variation in worldwide populations: evidence for differences and commonalities in size distributions and size restrictions.” BMC Genomics 14: 143.
[0559] Sherry, S. T., M. H. Ward, M. Kholodov, J. Baker, L. Phan, E. M. Smigielski and K. Sirotkin (2001). “dbSNP: the NCBI database of genetic variation.” Nucleic Acids Res 29(1): 308-311.
[0560] Simon, N. E. and A. Schwacha (2014). “The Mcm2-7 Replicative Helicase: A Promising Chemotherapeutic Target.” Biomed Res Int 2014: 549719.
[0561] Simpson, J. T., K. Wong, S. D. Jackman, J. E. Schein, S. J. Jones and I. Birol (2009). “ABySS: a parallel assembler for short read sequence data.” Genome Res 19(6): 1117-1123.
[0562] Singh, J., A. Behal, N. Singla, A. Joshi, N. Birbian, S. Singh, V. Bali and N. Batra (2009). “Metagenomics: Concept, methodology, ecological inference and recent advances.” Biotechnol J 4(4): 480-494.
[0563] Trapnell, C., B. A. Williams, G. Pertea, A. Mortazavi, G. Kwan, M. J. van Baren, S. L. Salzberg, B. J. Wold and L. Pachter (2010). “Transcript assembly and quantification by RNA-Seq reveals unannotated transcripts and isoform switching during cell differentiation.” Nat Biotechnol 28(5): 511-515.
[0564] van der Maarel, S. M. and R. R. Frants (2005). “The D4Z4 repeat-mediated pathogenesis of facioscapulohumeral muscular dystrophy.” Am J Hum Genet 76(3): 375-386.
[0565] van Dongen, J. J., A. W. Langerak, M. Bruggemann, P. A. Evans, M. Hummel, F. L. Lavender, E. Delabesse, F. Davi, E. Schuuring, R. Garcia-Sanz, J. H. van Krieken, J. Droese, D. Gonzalez, C. Bastard, H. E. White, M. Spaargaren, M. Gonzalez, A. Parreira, J. L. Smith, G. J. Morgan, M. Kneba and E. A. Macintyre (2003). “Design and standardization of PCR primers and protocols for detection of clonal immunoglobulin and T-cell receptor gene recombinations in suspect lymphoproliferations: report of the BIOMED-2 Concerted Action BMH4-CT98-3936.” Leukemia 17(12): 2257-2317.
[0566] Villesen, P. (2007). “FaBox: an online toolbox for fasta sequences.” Molecular Ecology Notes 7(6): 965-968.
[0567] Yang, J., N. Ramnath, K. B. Moysich, H. L. Asch, H. Swede, S. J. Alrawi, J. Huberman, J. Geradts, J. S. Brooks and D. Tan (2006). “Prognostic significance of MCM2, Ki-67 and gelsolin in non-small cell lung cancer.” BMC Cancer 6: 203.
[0568] Zerbino, D. R. and E. Birney (2008). “Velvet: algorithms for de novo short read assembly using de Bruijn graphs.” Genome Res 18(5): 821-829.
[0569] Zhang, W., W. Gong, H. Ai, J. Tang and C. Shen (2014). “Gene expression analysis of lung adenocarcinoma and matched adjacent non-tumor lung tissue.” Tumori 100(3): 338-345.
[0570] Zook, J. M. et al. Integrating human sequence data sets provides a resource of benchmark SNP and indel genotype calls. Nat Biotechnol 32, 246-51 (2014).
[0571] Zvyagin, I. V., M. V. Pogorelyy, M. E. Ivanova, E. A. Komech, M. Shugay, D. A. Bolotin, A. A. Shelenkov, A. A. Kurnosov, D. B. Staroverov, D. M. Chudakov, Y. B. Lebedev and I. Z. Mamedov (2014). “Distinctive properties of identical twins' TCR repertoires revealed by high-throughput sequencing.” Proc Natl Acad Sci USA 111(16): 5980-5985.

1-19. (canceled)

20. A DNA polynucleotide, comprising an artificial portion of at least 100 contiguous nucleotides, wherein the at least 100 contiguous nucleotides in the artificial portion:
(a) have a same relative order as in a 5′ to 3′ portion of a polynucleotide comprising a human gene locus; and
(b) are connected in the 3′ to 5′ direction in the artificial portion,
wherein:
the human gene locus is in human genome NA12878, human reference genome GRCh38.p13, or human reference genome hg19; or
the 5′ to 3′ portion of the polynucleotide comprising the human gene locus comprises a genetic variation of the human gene locus relative to human genome NA12878, human reference genome GRCh38.p13, or human reference genome hg19.

21. The DNA polynucleotide of claim 20, wherein the at least 100 contiguous nucleotides in the artificial portion:
(a) have a same relative order as in a 5′ to 3′ portion of a polynucleotide consisting of a human gene locus; and
(b) are connected in the 3′ to 5′ direction in the artificial portion,
wherein:
the human gene locus is in human genome NA12878, human reference genome GRCh38.p13, or human reference genome hg19; or
the 5′ to 3′ portion of the polynucleotide comprising the human gene locus comprises a genetic variation of the human gene locus relative to human genome NA12878, human reference genome GRCh38.p13, or human reference genome hg19.

22. The DNA polynucleotide of claim 20, wherein the artificial portion of contiguous nucleotides comprises at least 1000 nucleotides, and wherein the at least 1000 contiguous nucleotides in the artificial portion:
(a) have a same relative order as in a 5′ to 3′ portion of a polynucleotide comprising a human gene locus; and
(b) are connected in the 3′ to 5′ direction in the artificial portion
wherein:
the human gene locus is in human reference NA12878, human reference genome GRCh38.p13, or human reference genome hg19; or
the 5′ to 3′ portion of the polynucleotide comprising the human gene locus comprises a genetic variation of the human gene locus relative to human genome NA12878, human reference genome GRCh38.p13, or human reference genome hg19.

23. The DNA polynucleotide of claim 22, wherein the genetic variation is a single nucleotide polymorphism.

24. The DNA polynucleotide of claim 22, wherein the genetic variation is an insertion or deletion.

25. The DNA polynucleotide of claim 22, wherein the genetic variation is an inversion or translocation.

26. The DNA polynucleotide of claim 22, wherein the human gene locus comprises a disease-associated variation relative to human genome NA12878, human reference genome GRCh38.p13, or human reference genome hg19.

27. The DNA polynucleotide of claim 22, wherein the human gene locus comprises a cancer-associated genetic variation relative to human genome NA12878, human reference genome GRCh38.p13, or human reference genome hg19.

28. The DNA polynucleotide of claim 20, wherein a gene of the gene locus and corresponding genetic variation is BRAF and COSM476, KRAS and COSM521, IDH1 and COSM28746, EGFR and COSM6224, FGFR3 and COSM715, PIK3CA and COSM775, MYD88 and COSM85940, KIT and COSM1314, CTNNB1 and COSM5664, NRAS and COSM584, DNMT3A and COSM52944 or FOXL2 and COSM33661.

29. The DNA polynucleotide of claim 20, wherein a gene of the human gene locus and corresponding genetic variation is EGFR an COSM6223, II.7R and COSM214586, IL6ST and COSM251361, or KIT and COSM1326.

30. A composition comprising a first amount of a target DNA polynucleotide comprising a human gene locus and a predetermined amount of a DNA polynucleotide comprising an artificial portion of at least 1000 contiguous nucleotides, wherein the at least 1000 contiguous nucleotides in the artificial portion:
(a) have a same relative order as in a 5′ to 3′ portion of the target DNA polynucleotide comprising the human gene locus; and
(b) are connected in the 3′ to 5′ direction in the artificial portion,
wherein:
the human gene locus is in human genome NA12878, human reference genome GRCh38.p13, or human reference genome hg19; or
the 5′ to 3′ portion of the polynucleotide comprising the human gene locus comprises a genetic variation of the human gene locus relative to human genome NA12878, GRCh38.p13, or hg19.

31. The composition of claim 30, wherein 0.1-10% of DNA polynucleotides of the composition are DNA polynucleotides comprising the artificial portion of at least 1000 contiguous nucleotides.

32. The composition of claim 30, wherein less than 0.5% of the DNA polynucleotides of the composition are DNA polynucleotides comprising the artificial portion of at least 1000 contiguous nucleotides.

33. The composition of claim 30, comprising 3-3000 different polynucleotides wherein each of the 3-3000 different polynucleotides comprise a different artificial portion of at least 1000 contiguous nucleotides, wherein the at least 1000 contiguous nucleotides in each different respective artificial portion:
(a) have a same relative order as in a 5′ to 3′ portion of a polynucleotide comprising a human gene locus; and
(b) are connected in the 3′ to 5′ direction in the artificial portion,
wherein:
the human gene locus is in human genome NA12878, human reference genome GRCh38.p13, or human reference genome hg19; or
the 5′ to 3′ portion of the polynucleotide comprising the human gene locus comprises a genetic variation of the human gene locus relative to human genome NA12878, human reference genome GRCh38.p13, or human reference genome hg19.

34. The composition of claim 30, comprising 3-300 different polynucleotides wherein each of the 3-300 different polynucleotides comprise a different artificial portion of at least 1000 contiguous nucleotides, wherein the at least 1000 contiguous nucleotides in each different respective artificial portion:
(a) have a same relative order as in a 5′ to 3′ portion of a polynucleotide comprising a human gene locus; and
(b) are connected in the 3′ to 5′ direction in the artificial portion,
wherein:
the human gene locus is in human genome NA12878, human reference genome GRCh38.p13, or human reference genome hg19; or
the 5′ to 3′ portion of the polynucleotide comprising the human gene locus comprises a genetic variation of the human gene locus relative to human genome NA12878, human reference genome GRCh38.p13, or human reference genome hg19.

35. The composition of claim 30, wherein the genetic variation is a single nucleotide polymorphism.

36. The composition of claim 30, wherein the genetic variation is an insertion or deletion.

37. The composition of claim 30, wherein the genetic variation is an inversion or translocation.

38. A method of synthesizing one or more polynucleotides, the method comprising:
(i) obtaining a first nucleotide sequence comprising at least 1000 contiguous nucleotides having a same relative order as in a 5′ to 3′ portion of a target polynucleotide comprising a human gene locus, wherein:
the human gene locus is in human genome NA12878, human reference genome GRCh38.p13, or human reference genome hg19; or
the 5′ to 3′ portion of the polynucleotide comprising the human gene locus comprises a genetic variation of the human gene locus relative to human genome NA12878, human reference genome GRCh38.p13, or human reference genome hg19;
(ii) reversing the first nucleotide sequence to obtain a second nucleotide sequence;
(iii) synthesizing a polynucleotide using the second nucleotide sequence to obtain a synthesized polynucleotide containing an artificial portion consisting of at least 100 contiguous nucleotides that:
(a) have a same relative order as in the 5′ to 3′ portion of the target polynucleotide; and
(b) are connected in the 3′ to 5′ direction in the artificial portion.

39. A method of synthetizing a polynucleotide, the method comprising:
(i) obtaining a sequence to use for synthesizing the polynucleotide, wherein the sequence comprises at least 1000 contiguous nucleotide that:
(a) have a same relative order as in a 5′ to 3′ portion of a target polynucleotide comprising a human gene locus; and
(b) are connected in the 3′ to 5′ direction,
wherein:
the human gene locus is in human genome NA12878, human reference genome GRCh38.p13, or human reference genome hg19; or
the 5′ to 3′ portion of the polynucleotide comprising the human gene locus comprises a genetic variation of the human gene locus relative to human genome human genome NA12878, human reference genome GRCh38.p13, or human reference genome hg19; and
(ii) synthesizing the polynucleotide using the sequence to obtain a synthesized polynucleotide.

The application's sequence listing, which the Patent Office published only in electronic form, follows.

SEQUENCE LISTING (485 sequences)

SEQ ID NO: 1 - DNA, 761 bp, synthetic construct
  misc_feature 1..761: note = Synthetic DNA standard
  source 1..761: mol_type = other DNA
gatttaggtgacactatagaagtggtcgcgggagggcgggtggggcccttgagtgccggcgaacgggctgtgcgcgggggcgtaggttgagaagcgatggtgaagagccctcacggaaggggcgggggcggacgagccacggggccctcgagtgcccagcggcgcgggcgcaggtccgccgccacacgccctccctcccgagggcgggacaggcaggccacacggattcgcgccatgtcggcgcacggagaggactccttaggcgcactacgggccggctttggggtgtctcctctggaaggactttttacgcgcgccgccgcgagtaggcgcagagctcccggcaggtctgtgtcgaggtttggcacacagtcggggttgaccggccatgcaacctcgtaacgccggcccaaggctgcccggggacttgggtgttaagtcgtggtcctcgggcgtcgctctcagtttccctcgtaggccttccaaagggtcggcaccgggcagcgcacaagatagctcgggagcacacggacacacccccgatgagtggttgcgctacggggcacgataccattctgagatgcgcctcttgtacccggaacggatccgcacagtatggccctctgccttgtgctcctggtcattaccgcagatcctaaccggggagcccaagtaccgatcgaacctgcctccggtatatgcgtatccaagtacttgatcgatacaaaaaaaaaaaaaaaaaaaaaaaaaaaaaagaattc

SEQ ID NO: 2 - DNA, 843 bp, synthetic construct
  misc_feature 1..843: note = Artificial DNA standard
  source 1..843: mol_type = other DNA
gatttaggtgacactatagaaggccacacggattcgcgccatgtcggcgcacggagaggagttatataagcgggactctgacagatggctaggtgttcagggcgcggggtgttgacagcaaggttctccggggggccggacaagcgctatggcgcgtgactgcgttgctggcggcctccatcacaaggactggacccggggcccgtgggcttggatcctgcaggagttctcgcttgagctattcgccacaatccacgccggcttcgggcttaaccgacggcctccggactaagggccttgcccccgtgtggcccccggcacgagagctctcttgtgctccttaggcgcactacgggccggctttggggtgtctcctctggaaggactttttacgcgcgccgccgcgagtaggcgcagagctcccggcaggtctgtgtcgaggtttggcacacagtcggggttgaccggccatgcaacctcgtaacgccggcccaaggctgcccggggacttgggtgttaagtcgtggtcctcgggcgtcgctctcagtttccctcgtaggccttccaaagggtcggcaccgggcagcgcacaagatagctcgggagcacacggacacacccccgatgagtggttgcgctacggggcacgataccattctgagatgcgcctcttgtacccggaacggatccgcacagtatggccctctgccttgtgctcctggtcattaccgcagatcctaaccggggagcccaagtaccgatcgaacctgcctccggtatatgcgtatccaagtacttgatcgatacaaaaaaaaaaaaaaaaaaaaaaaaaaaaaagaattc

SEQ ID NO: 3 - DNA, 1368 bp, synthetic construct
  misc_feature 1..1368: note = Artificial DNA standard
  source 1..1368: mol_type = other DNA
gatttaggtgacactatagaaggggcggggagggtttgcaggtcgacctgcggagtccggctctaccccgcgcttcaggcaggctcggcggccccacttcggcccgcggctccacccccggctccgctccggcccaactgaaacgctccacattagactgaaagatgagaactggcggatacgggataaacaggtcccggatgttttaccttgttgtcagggagaagagaactaggtctaaatgtagggcaagaggtgtgagccttcgcagggatgtaattaagaaactcggggttagttcgcgcggttactcctgtctgacgtgaagcgagcgaagtcgacaagcactgcgaaggcacttctatggctgggggcaaattccgggcctctggcaggggcttcaggattatcgcaccatgtaaaccccgacgccgtaccacggcccgggacccttgcggaacccttcggccggtacggagacactcttcgacacatgactggcccgggcgtcgcgaatattcgagtgatatgctcttcccatcctggagacgagtggtggcgggcccctatagcagagcactatctggagccgccgaggaatgaaacagagctaggattcaacactagtccgacctcccacctcgtttacgctaatcaggtcgtcgccgccgagcgcgggcacctagtcgggttccgggggcaccgaaaatactggaatcataatccgggcaggaaaggtcctacattggagcgctcgagtacggcgccggctgcccggcggcgcccatggaacagtcccagaccgaataggctagggaaacgaggtcataggatgggttggatagagtatttgctcgcaccgttgagggattcgggcaattacgctggcgaaaggcgttgtgagggctcccgatgccactagtagtgaacttggtcgcaggggagtaacgctgagtccgcagatccgtcctaggactcgcaagcgggcacctaatgccgtacactaaggcaaacccactcaaaacgaactgctagattgggcgttggcacaacacgagcgtcacgcctagggccacgcaagaaccggcctggctagtcccaacgcctgcggcgcgagcggaatggcaggcaaactaggcgctgcggcggggggtgtacaccaggaacatgcacccaaccgacgggacggggcggggagggaaagcgcaccgaaatccgggggggccttcgtacctgcgccgaagtaagcaagggggaccgatgctctccagccgcaccccggctcggcgcccccgtctgcggacggcaccgcctttggtccctcatgctgtcaaaaaaaaaaaaaaaaaaaaaaaaaaaaaagaattc

SEQ ID NO: 4 - DNA, 1640 bp, synthetic construct
  misc_feature 1..1640: note = Artificial DNA standard
  source 1..1640: mol_type = other DNA
gatttaggtgacactatagaaggggcggggagggtttgcaggtcgacctgcggagtccggctctaccccgcgcttcaggcaggctcggcggccccacttcggcccgcggctccacccccggctccgctccggcccaactgaaacgctccacattagactgaaagatgagaactggcggatacgggataaacaggtgttgtgtgcttcagggtgttgcatagagtgctttccatggctgtttccagaacgttcagcgccggagggggggactcagtccgtccagttcgggcatcagtcgtggcgtcccggatgttttaccttgttgtcagggagaagagaactaggtctaaatgtagggcaagaggtgtgagccttcgcagggatgtaattaagaaactcggggttagttcgcgcggttactcctgtctgacgtgaagcgagcgaagtcgacaagcactgcgaaggcacttctatgccggtacggagacactcttcgacacatgactggcccgggcgtcgcgaatattcgagtgatatgctcttcccatcctggagacgagtggtggcgggcccctatagcagagcactatctggagccgccgaggaatgaaacagagctaggattcaacactagtccgacctcccacctcgtttacgctaatcaggtcgtcgccgccgagcgcgggcacctagtcgggttccgggggcaccgaaaatactggaatcataatccgggcaggaaaggtccctgcccggcggcgcccatggaacagtcccagaccgaataggctagggaaacgaggtcataggatgggttggatagagtatttgctcgcaccgttgagggattcgggcaattacgctggcgaaaggcgttgtgagggctcccgatgccactagtagtgaacttggtcgcaggggagtaacgctgagtccgcagatccgtcctaggactcgcaagcgggcacctaatgccgtacactaaggcaaacccactcaaaacgaactgctagattgggcgttggcacaacacgagcgtcacgcctagggccacgcaagaaccggcctggctagtcccaacgcctgcggcgcgagcggaatggcaggcaaactaggcgctgcggcggggggtgtacaccaggaacatgcacccaaccgacgggacggggcggggagggaaagcgcaccgaaatccgggggggccttcgtacctgcgccgaagtaagcaagggggaccgatgctctccagccgcaccccggctcggcgcccccgtctgcggacggcaccgcctttggtccctcatgctgtcgtccccttttgcaactttccctggaataggactttacagacaccagccgggggtgggtgaccacaaccgaaacgtcggcgggctagggggtcgccagcgggggccctggtctctgtgggggttctgggcgcggggctgggccggtcaggtttcttcacacctccgccctccgctccgcggactacagcgcggttctatgctggcctgtgcgttgcggggtgctgacgaccgagaggaggtggcggcgtcggctcgattcgtaccgcttctacaccatggaacttcttgcgggcgaaaaaaaaaaaaaaaaaaaaaaaaaaaaaagaattc

SEQ ID NO: 5 - DNA, 1998 bp, synthetic construct
  misc_feature 1..1998: note = Artificial DNA standard
  source 1..1998: mol_type = other DNA
gatttaggtgacactatagaagccggactgccttgtgctggactacagcgggaaccgcgcgcaaaggcgcggcctggggcctgagggcctactcggacgcatgtggctgccactccgtccgcgtccgttcccgggctctcggaaccggtctcaaccggggaggcacgaccacccctgagccgccgccagaaagcggtgcaaaaggatgaaagaggagaccgggtttgtggaggagggtccggaccatcgagtccaaccaggtaccatctagccggcgccagcgctttcgcccagcttgtatgttaaggagtagactttccatgcttgggattcgtctcgagtcgacggaactggttcctagggcagggagcctcctggagtcaccaacctgccgcggacctagagcggtctagtagggggagaggttcatctccgagttgacgccctcccacgcccatgacaccattccgagactcggaccgcggctacgaattggggcgagcgtcggagaccggaacccgtccttctcgggataaccgggggctcgcggccgaccttagacgcgacacggcaccccgcccgcggtcgcggcaagaagccccccccgggaaggacatgcgttcagttagcgtaccgcggtcggtgcgcgtcgagtcggcgacacttctcaacaagaccccggagcgtgtggcgggtcccttacccgcgctggggcagccgctgccctcctcccaagcgatacccgacagcggggagagggaccacggcgcgaggggcgctggacggggacctcattgggcacaagcgccggctcggggctggagccaccatagccacgcgaggacgaagggagcactagcagtccttctctactccgtagagccttccccatgcggacgaatgaggacgtgagatcgggcgctctcctgcaccctgcacagtagcttgagtagcgcttacgcaatgtcgcatcactagacctgcaatgacttcaatgacggacgtacccttgagtgggctcgccgaaagtacattggaatttccgatctgtatggccttgttaacgtctgcctggtacttttcgctcccacccgtgaggcaaaaacaggatcattgtgaccccggatagcgaggctaaggccgataatagacctccgggcgtcaggcgcccagcagtgcagtgcgcggagcagtaaggtagtagggcgaggtaggaccgggctgcccgtatgaccctgcccccgaacgagaatctgaggggacaagtcgtcggcgctttaccggacgagcatctcctggccccaatggacgccatagtgccagcccggccagggctgggtgcggcgcgacccggggccgcaagaggagatgggagattggccccgctgagcctacagacgcttctcctatgtatcccgcaaccagaaagggatggggttccgtccgtggacaacaaccctatcaatcatctcgcccgagaaagggacgacttgtttctgttcggccgattgtggtcggctcccctggtagcggtgcaggcttgagtccgcggttcatgcgccacttgccttctagtgcctgccctcaggttcgacgcctgtcgtcccgtccccgatcgtcgtgttccccctcttacccccggtccccctgcaaaacgcacggctaatgtcaagccacggctgctctgtgctgggtcgccaccagtctccgatctcacttcctatacaatacgaccaacatcctcaccgcccctcagccgtcaattttcctggctaaccgccgttgtcttctctgggccctatagttgcgctggcggggctgatattcgtttgtaacatactggtctacgccgggccgcggtaacagcaaaaaggacacgtaccacttatacggtggcttttctcccccgcgtgctgctccagaggtgcagtttaattccctctgaattatagtagtgagtaaaaaaaaaaaaaaaaaaaaaaaaaaaaaaaagaattc

SEQ ID NO: 6 - DNA, 756 bp, synthetic construct
  misc_feature 1..756: note = Artificial DNA standard
  source 1..756: mol_type = other DNA
gatttaggtgacactatagaagccggactgccttgtgctggactacagcgggaaccgcgcgcaaaggcgcggcctggggcctgagggcctactcggacgcatgtggctgccactccgtccgcgtccgttcccgggctctcggaaccggtctcaaccggggaggcacgaccacccctgagccgccgccagaaagcggtgcaaaaggatgaaagaggagaccgggacggaacctcgactgggatcaggggaccgcgccagatcgcgggaaggtaggctggatgacatgaatgtcgccaccgaacgtgagtggggagcacaggtgcctgctgctatatagcgcaaaccgccgcttgcccggaacgcgtaaggtgtcgcctaatgtccaaataccagcacctccgcatcacatttagcgaggaatcaagagaaccggcaccctctctgaacatcaaccagaaggaaaacctctttaaaaactcctccatgtctttgaatcatatctagactagctcctgaaggtcgtctatcaacggctagctcaaccaaagggttaaggagtactcggacgtctgactgttaaaagtgtggggcactaggagggaatgataggttcctgggatttgagctgagagaacaatcgatatgctacactcttctagcaaactaccgtgagcaaataatccctttgctgggtagcttgctcagaattatcagtttaaaaaaaaaaaaaaaaaaaaaaaaaaaaaaaaagaattc

SEQ ID NO: 7 - DNA, 722 bp, synthetic construct
  misc_feature 1..722: note = Artificial DNA standard
  source 1..722: mol_type = other DNA
gatttaggtgacactatagaagggcacccttatattacctttgaggttggctcttgatcatgaagagcaggtcaagtcaacagttaccacgcgctggaggggaccaatgaaggaacgtaaggcaaaggtatgctcacgaaaaagaggtcacacacgcttgagagggggcatgtcctgacttaccttggtggtggtctcgcgtacccaaccaactccgtattctgccaggagtatttggaaaatggatcgggttcaacctctctatcgatatacgaatgcagggcgtgaagataagaccgggtaacttgctgttgaccgcataagcttctgaggccaacacgaaagacatctatgtgtagtagacttgttcaccggatgtggggagttatcaagatccccaatgagctgtcgcgcgcgtaacatcccagctaatccttaggatctgtggagcttcactgttcgaagatcgcttacgtggatatggcgtggtgtttcgagcaccccacgaggagaacctatagtagtagactgggtggacttattgcatgcgagtgaaggtacgtcaagtgatgacttagatagaacaatcatataatctcaacctaatgatgcagctatgtgtctaaagagtgagtaagtttacgaagaaaccttaattagtgttataataatatttgaaccactcaaaaaaaaaaaaaaaaaaaaaaaaaaaaaaagaattc

SEQ ID NO: 8 - DNA, 925 bp, synthetic construct
  misc_feature 1..925: note = Artificial DNA standard
  source 1..925: mol_type = other DNA
gatttaggtgacactatagaagcttacagtccccggccggcgccgcgggcaccgggcagtggcaggcggcgaggaggcggcgaagggacgggggccacagtgctgcccaggcgaaccccgccggcctgactcctagtagctgggagtacggtcgacagcgagtaggtaagcggggctggacttacgtatatagtggtttgatatgtatcggttacctacgcaacgctgctagtgtcttgtgggtgtgatcctaggaggtcgttattgggagtgatgatctgaggctgcgtaatgagccaatgtccatcactatctttcgggcacactctacgttgcaatagggatatcatatcgaggaggggagaggattatcgataaaggattagcggtagcctctctgtttttatcccgttcgaatccattcattttggcgtattatctacagcgtattcggtcactccccccttagcgtagaacgtgtgccccaactgtaacccttaacgatatcataactcgacgtggtagggcgctcgcgctaacagcctacagttgctacgtggggatataccaatcgtcccgagtgtccttgagtgttatcctggggctgtcgatttctactggctgaataattgaggagactccccatacctgaatgtatcaagaactagattttgtctcaagtccttcacagcttaatttcccgaaagaatcttctacaacttattgtgtgtacaaatgcgctgcttttatgcgtacaagtactctgtgaacatatgacgttttaaaatcttttacgacggctgccctttgcttataatatgtaagtctagacgctctgatcataaatgcactatggttctgagtttgccgacggtgcgaataacagcctaaaaaaaaaaaaaaaaaaaaaaaaaaaaaagaattc

SEQ ID NO: 9 - DNA, 852 bp, synthetic construct
  misc_feature 1..852: note = Artificial DNA standard
  source 1..852: mol_type = other DNA
gatttaggtgacactatagaagccgggcgacccctgccacgcgcagtcggccagccattaccgccctcgcgcggtccagcttacagtccccggccggcgccgcgggcaccgggcagtggcaggcggcgaggaggcggcgaagggacgggggccacagtgctgcccaggcgaaccccgccggcctgactcctagtagctgggagtacggtcgacagcgagtaggtaagcggggctggacttacgtatatagtggtttgatatgtatcggttacctacgcaacgctgctagtgtcttgtgggtgtgatcctaggaggtcgttattgggagtgatgatctgaggcaatccattcattttggcgtattatctacagcgtattcggtcactccccccttagcgtagaacgtgtgccccaactgtaacccttaacgatatcataactcgacgtggtagggcgctcgcgctaacagcctacagttgctacgtggggatataccaatcgtcccgagtgtccttgagtgttatcctggggctgtcgatttctactggctgaataattgaggagactccccatacctgaatgtatcaagaactagattttgtctcaagtccttcacagcttaatttcccgaaagaatcttctacaacttattgtgtgtacaaatgcgctgcttttatgcgtacaagtactctgtgaacatatgacgttttaaaatcttttacgacggctgccctttgcttataatatgtaagtctagacgctctgatcataaatgcactatggttctgagtttgccgacggtgcgaataacagcctaaaaaaaaaaaaaaaaaaaaaaaaaaaaaagaattc

SEQ ID NO: 10 - DNA, 1227 bp, synthetic construct
  misc_feature 1..1227: note = Artificial DNA standard
  source 1..1227: mol_type = other DNA
gatttaggtgacactatagaagccatcggcggtgccctacgggcgcatccctcggccgctccacgcccgcctggaccgcggacggagctcccgcagaccgataccccggcgaggaccttatccatacctcgtaacaatatgtggctccaatccccggtaatgtcgctcagattgcaatgacgtcgatgcgggttgccgagccctcaatgggtcggtcatgagcggttccgggggggataggtgaaacggcgaacacgcttagtaagattgaggcgtttaaacgcggggccgccgattactcacggacatggggggtacgaggacctacgcgaagggcctccaggagcgatttgacaagggaagtgcccaacggttggctcgtaccacggaccagggagtcccgctaggtcgttatcgcttgcaaaggaaaaattagtgaatggataaaagggcggtggtgaccatcccaatccaggaactagtccagataacaagtggatcccaacagtgagaaaccagggtttcccgaccccattctaataaccagcggtgggctgccgtgaggtatcgcaagcatattcccgttcttcaagcccgatttccagatgtctcccaccctaccaggagggcttctcaaaaactaatcagttggaaatcccgccctgccagtaaggtcttcgaggtagggaatatggtaaagggcggtatttcgagtccccaatagaaacgcgagccgaggttggggacggtctccctgacgacgcgaactcattcgccccggcagctgggattcttttcttctgtaccaacgacagcgcccccagcccgcacctgcccaacgtacaaaatgcgccagtggtctggagccgcgatcccggagcggcgaagaaacgcctgaatgcggccgcgcgtacccgccgggcgatgtccgatacgattagtctgatttgatcgcggaatgcaaacgtaaccggaactgttgcagtccttatattctgatcaatgaacctgtactagttgaggcacggattgccgcgatgtgtattcagaggtaagggaggggacgtcacgatcaaaaacgaggcggtcagtgggccttttgttcacatattcgaatgaatccaatgcgagttgaggaacgaacaatttaataattcctttgttgagccctatatgtcctccccccttcctaaaaaaaaaaaaaaaaaaaaaaaaaaaaaagaattc

SEQ ID NO: 11 - DNA, 1099 bp, synthetic construct
  misc_feature 1..1099: note = Artifical DNA standard
  source 1..1099: mol_type = other DNA
gatttaggtgacactatagaagccatcggcggtgccctacgggcgcatccctcggccgctccacgcccgcctggaccgcggacggagctcccgcagaccgataccccggcgaggaccttatccatacctcgtaacaatatgtggctccaatccccggtaatgtcgctcagattgcaatgacgtcgatgcgggttgccgagccctcaatgggtcggtcatgagcggttccgggggggataggtgaaacggcgaacacgcttagtaagattgaggcgtttaaacgcggggccgccgattactcacggacatggggggtacgaggacctacgcgaagggcctccaggagcgatttgacaagggaagtgcccaacggttggctcgtaccacggaccagggagtcccgctaggtcgtcaggaactagtccagataacaagtggatcccaacagtgagaaaccagggtttcccgaccccattctaataaccagcggtgggctgccgtgaggtatcgcaagcatcagttggaaatcccgccctgccagtaaggtcttcgaggtagggaatatggtaaagggcggtatttcgagtccccaatagaaacgcgagccgaggttggggacggtctccctgacgacgcgaactcattcgccccggcagctgggattcttttcttctgtaccaacgacagcgcccccagcccgcacctgcccaacgtacaaaatgcgccagtggtctggagccgcgatcccggagcggcgaagaaacgcctgaatgcggccgcgcgtacccgccgggcgatgtccgatacgattagtctgatttgatcgcggaatgcaaacgtaaccggaactgttgcagtccttatattctgatcaatgaacctgtactagttgaggcacggattgccgcgatgtgtattcagaggtaagggaggggacgtcacgatcaaaaacgaggcggtcagtgggccttttgttcacatattcgaatgaatccaatgcgagttgaggaacgaacaatttaataattcctttgttgagccctatatgtcctccccccttcctaaaaaaaaaaaaaaaaaaaaaaaaaaaaaagaattc

SEQ ID NO: 12 - DNA, 1747 bp, synthetic construct
  misc_feature 1..1747: note = Artificial DNA standard
  source 1..1747: mol_type = other DNA
gatttaggtgacactatagaagagcttgtccctccggcggctctcccgttggcctcatgtggccgccaacgcctcccgtaccgcgacgcttaccggtccccttcgggctcaacgggtcatagaaaagagtgcacaaaacgatgacacaccacgtgtttattggctggtatggcacatgcggagcttactgcgggtgctaagtaaagtcccgacattatggtataccgagattaacttcttactcagtgagttattcatctccgaagcacagctgcctttctggcgatagtgggacggatcccccatggagcagagcaggataaggctgtcaaaagtgttcccgtagtcgtcagtcaatattatcaagagaaaccgacataacccaaatagagctgcttaaaaaattctgctagagtcccgaggagatatacgtttataagggtaaataagaagtattaagaagagttcctcccactacttttcctccagagataaaactgactgcaaagggttgcgtcgggtgtcttgagctagcccggcctgcgtatgcaatccctgcaccgctcacaccctttcataacgaaccatcagcgctagagcggtcctgttacgcgtttacgttataaggactagatcccgtgtacttacactaggcaggaacagaagatgctacttatactccggtaagtacccgctatagtatcgaaagttgtccttagtaagacaacccaacttttgaaagtggatgttagcaggccataccgcatatttttgccggctactctgtttccacagactaaccgggcccgccagcagtgtgaaggaaagaggtaggcacgcactgtgcccgatcgcagtgcttacggaatgatcacggacataacagtagcgtgagtttgtagtggttaatgccgtcagaaaaaattaaataatctggcgtagcggatgtgacaaattaggaagtgcctggaaagccggggagatttaataaggtctagagcggctctatagagacgtcagcaacagtcatgccctactgtgctgcgacccagtgtcgtcttacgaaccgccacttaacgctggaatcgcgaccgacgcattcaaagctatgcgatacccatctcctaaaattttgagtagtgatgttcattattctggcttaaagattaaaggcacgtggacgtacgtatattatggggaaatgaaacaaaagctcggcgaattgatacaaatgattaatggtccggtcatatttagtgaactgtttgttagaagacaaagaaaggagtagggtacaagtagctacaagggcggagaaaaaaccttacaatatcacatgttacacctagcaaccaaaagggcttttgttcacggtttggagtcaaacttgtaataaaactttccgtgtgaatccgaatggaactcggatcgaaagataaaataatgtggatttacagggcggagataattttgtttgtttttgttttgcgggcatcaactggcattcgacctacgagcatcctttagttatatatctctccatcctgttaaaagaaatcgcacgatagaaaatcctaagctaaactagtgctaattactactttagcctcgctttaaactgcgagttatgtcgtgttttatacctttggagcccgcgattccgagatcatttggactgcttgtgcaatggttctaattttgtgctgcgtataaaaaaaaaaaaaaaaaaaaaaaaaaaaaagaattc

SEQ ID NO: 13 - DNA, 1240 bp, synthetic construct
  misc_feature 1..1240: note = Artificial DNA standard
  source 1..1240: mol_type = other DNA
gatttaggtgacactatagaagtagaggcgttaacgactagtacagcttctaacgacgctgggttattaggaagctaaagtcatagcggaggcggtcctgttacgcgtttacgttataaggactagatcccgtgtacttacactaggcaggaacagaagatgctacttatactccggtaagtacccgctatagtatcgaaagttgtccttagtaagacaacccaacttttgaaagtggatgttagcaggccataccgcatatttttgccggctactctgtttccacagactaaccgggcccgccagcagtgtgaaggaaagaggtaggcacgcactgtgcccgatcgcagtgcttacggaatgatcacggacataacagtagcgtgagtttgtagtggttaatgccgtcagaaaaaattaaataatctggcgtagcggatgtgacaaattaggaagtgcctggaaagccggggagatttaataaggtctagagcggctctatagagacgtcagcaacagtcatgccctactgtgctgcgacccagtgtcgtcttacgaaccgccacttaacgctggaatcgcgaccgacgcattcaaagctatgcgatacccatctcctaaaattttgagtagtgatgttcattattctggcttaaagattaaaggcacgtggacgtacgtatattatggggaaatgaaacaaaagctcggcgaattgatacaaatgattaatggtccggtcatatttagtgaactgtttgttagaagacaaagaaaggagtagggtacaagtagctacaagggcggagaaaaaaccttacaatatcacatgttacacctagcaaccaaaagggcttttgttcacggtttggagtcaaacttgtaataaaactttccgtgtgaatccgaatggaactcggatcgaaagataaaataatgtggatttacagggcggagataattttgtttgtttttgttttgcgggcatcaactggcattcgacctacgagcatcctttagttatatatctctccatcctgttaaaagaaatcgcacgatagaaaatcctaagctaaactagtgctaattactactttagcctcgctttaaactgcgagttatgtcgtgttttatacctttggagcccgcgattccgagatcatttggactgcttgtgcaatggttctaattttgtgctgcgtataaaaaaaaaaaaaaaaaaaaaaaaaaaaaagaattc

SEQ ID NO: 14 - DNA, 4635 bp, synthetic construct
  misc_feature 1..4635: note = Artificial DNA standard
  source 1..4635: mol_type = other DNA
gatttaggtgacactatagaaggtcgcggtacgaatgcgcgaacccagaagaacaaggcgtgggaccgggggtggatcacggggtgcaatcccccggctcggctcgaggctgttcccgaccggtgacaacagcgggaggccggcggatggtggagggagttttcccgagctggccaagtctcccccttctggtgagggcggacaaggaggcgcatgacgtcataggccctcttggtgctatgagtggagaatgcaatcatgcgtaggcacgcggagcgcaccactcatttttcggcccaaccagggctcatgaagttgtacttttgtgatcggggtacgccaagccggctatcacccagcgcttacttcctcacgcgtccgccctctgcaaggtagactagatagttatgtgagcaaagcgtagcttgctctcctagacccgctcaaaccgacggtactataaacgcacgtctatcgtcaaacggaaggtcggcatagaaacgtggcatatggggaagctactaccaaccagggggtcgaggcgcgtgcgttcggaaccttcgccgaacaccttgctcccaggcggcactcctggcccataagagggcagcagggatggcacgctagaggctggggtctatgctctcagccgttcggaggtacggtcctagcccccttgaagtatacctccggggcgtgccaaccagtaccaacgtcatgacccttaattccgtcggaatcgacacgcacattgccctaaaccaactacgtctatccacgcaggcgctacccttgtgtgagttcggcgcgggagcagcccgctattcgtccgggaaatagtagaagacaggcaagtcactcctaaacgggaatgcgaaaccgctcatatatggtgacattcttaggtggcttgctccaatagcgcaaaagtaccgtgaaggaagaccagcaactgatgtcacatgccctcggcagaccggactgagaggctgcataaggaaggacaagccgcgcttgtacctcatggctcctcggagggaacgtgacaccccaaattctatgctaaatcaccgaacgtcgttaccggtttaagatgcgatcataaccccaacagagggggaacatcgggctagtactagtgtgaaccttcaggtaccagacggactagagaaatgtagggtgaccagtccctcctcttaacatcgcacagtgtcgttggacggtcacgtaggaaggctgcgtgtaaccgaagcgagagccaaacgccagcgcttgccgcgagggtaccccggaaacggcaggctccgcccgaccctaaaacggtggtgaccgaggaggaaaatggctaactagcggtcgtgccaacgtgttgcggctgcggctttagatctacgggcgccaagcgcttgacgggaggatcaacggcacgacggtcttttgccctcaagttttaggggtacagtaagcccgctctaaacactgttgtgcggacacccgaccagcacgggataccgttacccaggctggccaacacggtcgaactgcagattgctgcggtaaaggtcggcgccggcaacttactgaagctcttgccgcggtttataaggtctcctcctggcaggccgagcgccatggcgctacgaggaggtccggcatcatgatgccctatctagttcgacgtagcaccagacgggacggggcgttccacgcagttttgacgaccgctcgggcagaaaacacggcgatggcgggagtacggtgctgatcactcaccgtgcccgcggtaatgtcacggcgagccgctgccggaatgcccctcctaacgccctcttgcggccgtccgcggcatccgtcctctgtgggtaattgacaccgttggccaactcctctccttgtcggcaccaaccaggacatcaacacttgggtttgcgcagatgggcgcaaccccgtgccgcagccaaggcgcctgtggtttacggatgaacccacggctcgatgtgttacttgcctggaccgtggtagcggtgcctgagcggtcggctcctgcgacaacctattgtcgccattccttggtccctcgactccacaacttgtgttgcggaggcgtggcgctagattaggtgacatggccccagcgcgattgaggacggcggcgtcgtactggggtagagtgacgcaaagccccgggatctatcctaagctactataccttcgaagcgccgccatcgccggcgtgtgtccgtgcgcttgggcccctcccgaaatggcgggcgcgccgatactgggtaccgtgggccaattcaatcggacgtggggcgcggctcatggtctccacctaggcccgagccatgccgccacccggagctgagtccttctgtctatcagtacggggaggaagtgactggacgagccggtggggggggtttgcttcggagcccttgagcgggacgccggtacagggcccagagaacgccgtaccgttgggacggggctcgttaagcgcccacaccagccttggtgttacaggccttgacccatacgtcgcgcgtgcaaagttccctcgcgccgcttgctccacggacccagggacagatgcttgcgtttcctgatggcatagactctaccttatcgtccggcatcgcgcgtggggcccactatagtcagaccgccgggctgcgcgcccgctattcaggacgacggcccgtgaaactgcgaaggcctgggactgttctctccctgcaatgtccgcgccgtgacaaagagatcacatcacgctcagcacggcgtctctcgtaagacgccgggcataaccccgggagtgccctggccagctgtggagggtagggaccttgaggaggaccctcttcgatggtaaggcctgaccagggcgggagcccgcaaccggggacccctgggcctcgcggagagcgtgagggccagcaagccagggggccgctcccgtacccgcattcagataggcgccgctcgtagccctaggcgagaggccggggaacagaagccatggatgaacgtagcaggagcccccgagcgggctcatcccgggagtggagtgcacaggaatgtcccgaacgctgcgcggggggaactaaagtgcatgtgccgaactaacctcgatagggcaccccatccgtcgtcacgaaatactccccgtcgttaggtctcggctgttcgcccccccgggcggcgcctttatccgtccccgaacacacgaccatcgaatgcacagttcgacctgcgcgttaggcttcgtcgaatcaacagaggatccctggtcggccatgcgtactatagacgagcggagcttcttcgggacgaagtccgtcgccaacgatggacgcgcacccgtgacgggggtacctcccagaccaatgaagccccgagacacgcgggcagccgaatcgcgggctccttaaaggccacgagccctcccggcggtcccacacggacccaagaggccgccgccccgcctcaacctagagccacaaccgccgaccagatagaccgcagggtccgggggtggacatctgaaaaaggcgagccggcggcgcagaggaatcccctggcgctgcgtctggcgcatgcccggcgggtccctgctgtcccgagcgagcgttagcaattgagcactagggccacacagcaggcgacagcacatcggtagggctctggccctcgcattgtgcacaccgtgagatcacagtacgcccgcaatcccgctgcttggttatttcggcaggtcccctcgaaacatccactcgagcaaccccaagtgagggacgacctcccactggaggcgtccgccggaccggacgcgcaagccgaaccgggtgggccgtgggctcccatttcccttcacgccacagcccagccatgaaccaccgcccgttacgcagaggggagacagaaacagccgtcagctccgcacgctataggactttcgggtgggtgggacaccggagcggctgcgagcggactacgagcggttcagaccctccgcaccacgtgctagaggcgggcctagggctctggtgggcgcagacagaatcttcagaacggggacccgctggggacgccgcatccctgtcgccgggcgcctgtgacggtggcagtgtgtgcggttcgggcggggcagcgatacgttcgccctctcacgtactgtgacggcgaggcgccaccctttgcgacacccgcgtatcaggctaacctatcgtgccggtccctagcccccggcgaaccacgaatcatggggccggcatcggtattcgaccaccacggtcgccagggagacgcgtaagaaccgcgcctggtggcggttgcggcgtccctgtcgggttggtcgtccgctccccggtgtcgttgggccagggacagcgctcgcgaaacaccgcgatccgggctgcacagactgggcgggaattggcggagcgaccaggcccagccgctgcaccccccctgtggcctgggctagcctgggccgctgggtcacacaaggcaccatcccccccgcaactgggctgccagtcataggtgaccatactcgctcgccgatacgatcctgagcatggtggtaccccggggaaaaaaaaaaaaaaaaaaaaaaaaaaaaaagaattc

SEQ ID NO: 15 - DNA, 719 bp, synthetic construct
  misc_feature 1..719: note = Artificial DNA standard
  source 1..719: mol_type = other DNA
gatttaggtgacactatagaaggcccggctgtgggcaccccctcgccctggcggcgccttcgtttctcggcgcttcccgctccccggtccccgttcgtcggcctaggcgccaaagcgcaccaccgatgtcccccggcggcacgcgaagccagtggggcaccgcggggctgggcctcgagcgcgcgcgcctgttatggtatttgaacaagttaatacgcaactgtaagcgaacctttatctcttataattcagctccatccacctcagaacaagtcccgcaatgcgtctttgagacgtacatcctgatcagattcgagttacacgagatctatcaaaacagactcatcagtcatcaaaaacacgcaatgacacggtgcctaagagtggtctagatacgtaggaagaaggaagataactgttcagtacacggcgtataaggtcgtcattaccatgctgttttgtgataactaaaaaaaactaaggtaaatgcgagcccgattgcatcgaacttgtcgatgaacactcgaacgcagttgaaacttactaagcaaatctgaaagatggaaatgcgttaagaaaccacagatgaagagatagcacaaatagttacattaatgttcggatcatgctgttattagtttacgccggtctgagtcttccggcgtgctctcaaacagatgccgaaaaaaaaaaaaaaaaaaaaaaaaaaaaaagaattc

SEQ ID NO: 16 - DNA, 1524 bp, synthetic construct
  misc_feature 1..1524: note = Artificial DNA standard
  source 1..1524: mol_type = other DNA
gatttaggtgacactatagaaggcccggctgtgggcaccccctcgccctggcggcgccttcgtttctcggcgcttcccgctccccggtccccgttcgtcggcctaggcgccaaagcgcaccaccgatgtcccccggcggcacgcgaagccagtggggcaccgcggggctgggcctcgagcgcgcgcgcctgttcatagcagcttgaatccaggcaatcacaggacggaaagctactatgataagaaataaatatttcggaaagaaatctaaacgtggcgacggtaatagtactagatcgccattttgactgtcattcgcaagtagggaacaccgacattataagcattattttggcatataggaggataggcatgaaattcagttatggtgaaatatagtgtgagtacgagattcatttacatctggtaatattctcaggaatgaagtttatgtacaaaagatccaaacacgctgtaaagggacgctttgctgcagcggagaatgatttgttcctgcggcaccgagcactgtttgaactagaaaaatgctacaagtgggtcgtgaaaaacagaagactgcgcatatttgaggcgaagaaaccaacgatatagatccgaaccggatgacaacagctcagctagagacctaagaacggttagtataaggcggtatttaagactaagatgtgtggcttagcaggctgatggtatttgaacaagttaatacgcaactgtaagcgaacctttatctcttataattcagctccatccacctcagaacaagtcccgcaatgcgtctttgagacgtacatcctgatcagattcgagttacacgagatctatcaaaacagactcatcagtcatcaaaaacacgcaatgacacggtgcctaagagtggtctagatacgtaggaagaaggaagataactgttcagtacacggcgtataaggtcgtcattaccatttcagtggacattcgccaggacgaacagaaaaaccattatattgcccccattccgatgtaagccgtctggcaagatacgaacgggtccacccacataagtatccccgggctccctttcgaactgcatgtagtgaagcttagtgtgcatttttgtctctcgcccgttcttcttaaccttgacttgctaacgcccagcatgagatgtgcatggccgtaaggggtaatttatacgcgggtgtgcggctaggcgtttcttccccctgtgcatctccgtaatcaaagctccagatcagtgctgttttgtgataactaaaaaaaactaaggtaaatgcgagcccgattgcatcgaacttgtcgatgaacactcgaacgcagttgaaacttactaagcaaatctgaaagatggaaatgcgttaagaaaccacagatgaagagatagcacaaatagttacattaatgttcggatcatgctgttattagtttacgccggtctgagtcttccggcgtgctctcaaacagatgccgaaaaaaaaaaaaaaaaaaaaaaaaaaaaaagaattc

SEQ ID NO: 17 - DNA, 1002 bp, synthetic construct
  misc_feature 1..1002: note = Artificial DNA standard
  source 1..1002: mol_type = other DNA
gatttaggtgacactatagaagagccatcgcgcccgcacgctgcggcgtgctcggcccacaccagccaccccgcggtgccaaaccgcaacccgttcgccacaaacgagcacgcgcccgcacaaccagaagagcagtgcgtcgccaacgggcccaagaaaaaccaacccggctcaagcaagaccgcgacatttggatgccccgagtctttatgaaacgttctggcagcacatgcataaattatttgccggcagcaggtaatacttagtatcgccgcgaagctcaggtgcgcacgcagaatctgctgcggcgaagctcacgggacccagaaaaaggagccgttgaacgaggggatcacgatcctacccccggactcggtcttcagatcacccggtgttctggacggggaacgcaaacactggcatgagttgcctgaagacccggacctgcgcctcagtctggtgtacagactgctcggttagaacctagtaccctcgcccacgcatccgagtagcgtgatcccgcagtggatagatcggtaaggccagcgtgaagggagatctcagatgcgacgaaacgatagcatgcttaaacctgtatgcaaggcaatcaatcggcccccacgctgaggcggaacgtcacaaaaatcccacagaatccccgcacccccccctacgtcccccaccgcccccgaacgcacgcccagcctcctcaagacccccttcgtactcgctccctggacggacttccggcactggtgatcctagttctggacgcggacggaggataggcaacagacgaactgtggcgccagggtaagtgtaccgacgcaaagcgcccccccttactcaccggggcgcctattatctaaccaacgtcgatcggggcaatggccgagaggcggaacagtgtgagggtcagccagaacgggaacccggggtgccctcccatcctatggggaggagagaaaaaaaaaaaaaaaaaaaaaaaaaaaaaaagaattc

SEQ ID NO: 18 - DNA, 841 bp, synthetic construct
  misc_feature 1..841: note = Artificial DNA standard
  source 1..841: mol_type = other DNA
gatttaggtgacactatagaagagccatcgcgcccgcacgctgcggcgtgctcggcccacaccagccaccccgcggtgccaaaccgcaacccgttcgccacaaacgagcacgcgcccgcacaaccagaagagcagtgcgtcgccaacgggcccaagaaaaaccaacccggctcaagcaagaccgcgacatttggatgccccgagtctttatgaaacgttctggcagcacatgcataaattatttgccggcagcaggtaatacttagtatcgccgcgaagctcaggtgcgcacgcagaatctgctgcggcgctcggttagaacctagtaccctcgcccacgcatccgagtagcgtgatcccgcagtggatagatcggtaaggccagcgtgaagggagatctcagatgcgacgaaacgatagcatgcttaaacctgtatgcaaggcaatcaatcggcccccacgctgaggcggaacgtcacaaaaatcccacagaatccccgcacccccccctacgtcccccaccgcccccgaacgcacgcccagcctcctcaagacccccttcgtactcgctccctggacggacttccggcactggtgatcctagttctggacgcggacggaggataggcaacagacgaactgtggcgccagggtaagtgtaccgacgcaaagcgcccccccttactcaccggggcgcctattatctaaccaacgtcgatcggggcaatggccgagaggcggaacagtgtgagggtcagccagaacgggaacccggggtgccctcccatcctatggggaggagagaaaaaaaaaaaaaaaaaaaaaaaaaaaaaaagaattc

SEQ ID NO: 19 - DNA, 2419 bp, synthetic construct
  misc_feature 1..2419: note = Artificial DNA standard
  source 1..2419: mol_type = other DNA
gatttaggtgacactatagaagtgcgagtttaggtgcgtgactaagtttcctatacgtgtccgattgacattctattttatttattagactggtgatatagtcgacagtagtagattgagtggacgaataaactaccaaactaaaaatcgctaacccagccatgaaagagctagacagaactgcccgcgttgtacctgcgctctcctctccgcgattattcatccatgttgcaccatggaacgatgcgcatctaaacgatggcttataaatgtagtagtcaccacagaaatatgtcgtgatctcgtcccaaaaacgtcatggcctttgatcgcaacagccgagtctatcagtaactttatatcggtataggggctacggagatacggcttagcacgtcctacacctcctagagtttgtctcgaaatcctaagcgtagtcatagataatgagaatttggaataagcacccaagcctaactatatagaactggtagtaacggatgtacacgtaggacgagttaaaaatgtaatctgattaaatttggtcggtgctaagacggaaaaatctctatatcaagcgcatcgaagctccgggtaccagtaagtgagtagaaacagccaggtaaacatatagaacgtaatgagcaggcctatagttctacctctttgagactaatgaagagcaagaaaattagatatcatgagtgttcattgatttttactgggtaatattgttaacatatagcacatagtttcttccaatcgaggcacagccttcctctgtctttatagagaactatcataggcttcgaagaagtaaattcgaattaatgtgaccggttgattgttcgcattacttatgtgggaggtaaggagcttacagattagcaattaactaccgcctgacagtatgctagtatataagtgaataagtgactgcataagaagagatataaaaaagggttcgccctcatagactatgaagctcgcattaatgtcatccgaaaaaacggattgtccgaaatactatattcctgcatcaaaataagatacgggagtatacagtgtcatgtccgcattaactggaactcctaatgtaataatgaaagtacagtgatatttaagtttagtgatgatccttagtggaacataccatataatatgacatcttaaatcgttatcctccactagcgcactacctatttgagtacaaaattaaatgtaaacggtgttgtgtcttaccactaccagcataagggccccaaatcgatgtaaggtgatccacggcaaatttcacccgctcgcattgaggaaaattctcgagaaggcagctatagaaaggccgtactaattgtatgatgggctgaaggtacggagacggcgtatggttttgaaatctgaggaactagatatagtgggacggttggcacatatatggatgtggtcccattattcaatgtaagattgatgcgtcctgtttcaaaagaaatagaaacacagacggggaaaggagtcaaaaggaaaacaaccgattgtgatgtattaggcctttcggtccataaaaatactatcgcaattaataggactgatctagaagctgaacaaggataataaattcagaaactatgtaaacgacaatcatttgaatagaataaccactatgaaacttgggcaaaagacgaaaccgaaagagggaagtactaccggtggtagtagtgatagagtgcgacatcagttcctttatataaagtcgagaatgaagagcctcctgtctacccgttcaccccttttgccgagaccgtcctactaagtgttaccattgccaaccgggttcgaggtaggatgccgaaacgtcactccgaccataacgtctgatagagacaagaggatatcaagaatatgccggctagtgtatgccagacttggctatgccatgcaaatatactaacacggataccagggtttgagctatcttacgaaatggtgtatcccgaacatgtggggcgtggacgccatgcgctgaaaatttacaatagtcaaggtgcatagagtaatatgagctcgtacaatacagtaggagttgaaaatcaagtcattatacataaagtatcagaagataatcaggcctaaataatcgcccttgtcgaaattacatgattatcttcctaaactcaggttacaaggttgtgggtccgtaggcctgtaggtaaatccatgacgtcgatgaggcccatataaatcaaggattatcgcactgttgaacggttaacgtgtaatgctagctttccgatatcaaggcctaaataccgcgatttagtacagtgccgaaatagataacaagctccggtggtttcaaaaagtggtgatctcgatgtcagccgcaaaaaaaaaaaaaaaaaaaaaaaaaaaaaaagaattc

SEQ ID NO: 20 - DNA, 1080 bp, synthetic construct
  misc_feature 1..1080: note = Artificial DNA standard
  source 1..1080: mol_type = other DNA
gatttaggtgacactatagaagcgtggggtcgcgaaagaagcgtatccctttgagggctcctggatatgtccacaccgttccgtttttggcctatgcacgtcggttgtgttctacgaccttcgggttgtagcatgcttagcgggatcacgagccagtgcgagtttaggtgcgtgactaagtttcctatacgtgtccgattgacattctattttatttattagactggtgatatagtcgacagtagtagattgagtggacgaataaactaccaaactaaaaatcgctaacccagccatgaaagagctagacagaactgcccgcgttgtacctgcgctctcctctccgcgattattcatccatgttgcaccatggaacgatgcgcatctaaacgatggcttataaatgtagtagtcaccacagaaatatgtcgcacgtagtgccaactgaacgtgagagtgacgcgtaggtctaacaccgagggtcggagaggtcatagcgagcatccaaacacatgggaaaccaacggactccggagtgctaatatgaatacaaccgctccacgctcaggaaaaaagaaaaaaaatatgcgagcatatgagatcgggataacgttgttacgagtgtgtaaaagcgaccgatgcaacaggacaaaaatcgatgccgtgtctaagtgggacagcactcggaaataaaagactcgcgtcgacttccttaaacttggcgtctgtgtaatcattgtaaggcgcgcagagtcactactgctatagatcatcgaaggacgtactcagcgacttatcccaaagtcttttacttaactcttagctatagcccattaaaagtataactctactatatattaacagatatttgtgatgatggtttgacgacagcaaagggaatcttagtttcatttaccgggctcagttaacgaagcttctatcactcccgacgtgctttgaatcgtgtctgctcccgagaattgaataccccactaaaggacttctcttattagtttatacagttacgaagttttaaaaatttctaaaaaaaaaaaaaaaaaaaaaaaaaaaaaagaattc

SEQ ID NO: 21 - DNA, 497 bp, synthetic construct
  misc_feature 1..497: note = Artificial DNA standard
  source 1..497: mol_type = other DNA
gatttaggtgacactatagaaggccgggcccctcgcccgcgagtacgaccggcgagatcaccgctacggcgccgatacgcgtaagacgtgcgcggacgggtacgctcagtatgaaacctagtcgctctccagccattcccaacgccgacgcaatgggaaggacgcgctaagcgcggtatggactgtgctgatatacgaacatgcccgggtacttattttcgttaaacactgggagaggggtactggtggcattatggtctccttcttcgaacatagtaagcctactgcggttaccagggggggcccaggtatgagacttatgatgagtgtgatagcgatggcgatctgatgccagtggggccacgatttgctccccgtctttatactggcttgactctatggtatctgtaaaagaagcggcgggttgataaatgataatttcataaagatttaatccaaaaaaaaaaaaaaaaaaaaaaaaaaaaaaaaaagaattc

SEQ ID NO: 22 - DNA, 1059 bp, synthetic construct
  misc_feature 1..1059: note = Artificial DNA standard
  source 1..1059: mol_type = other DNA
gatttaggtgacactatagaaggccgggcccctcgcccgcgagtacgaccggcgagatcaccgctacggcgccgatacgcgtaagacgtgcgcggacgggtacgctcagtatgaaacctagtcgctctccagccattcccaacgccgacgcaatgggaaggacgcgctaagcgcggtagtcgcggacagcgggtcggggggatagatgctggaggtagatgtgtccacattgttgagagtccaggggcacgcggaagtggatcgggggaaggacgcgttagcaggtgtctcgacgatgccgttttttacaggagagcgttgggtggtttctgccttccataattagtggactgtgctgatatacgaacatgcccgggtacttattttcgttaaacactgggagaggggtactggtggcagttttgggccgctcttctctttgagttctaagcacgtcggtgaccgtacgggcctagtgggtctatgttcgtggagggtgatatctacgttcggaggagtgatacgtcctgtacggcggccgttgccatcggctgagtggggtcttggtaagggcaccatacgacctgaggacgtatggctacgtcaccttagcgtgcaccccccggacacgagtcggccgccctctcaccagagtggtcaccaggcggctcccgggcggggtctaatttcctgaccccttggcctctccacgcgggggggcattggacgatgggacatcccatctgggcggtggatctgtccggcccccaaggagggtttatttttcaatcataggtcgtttgtttatgttagttatggtctccttcttcgaacatagtaagcctactgcggttaccagggggggcccaggtatgagacttatgatgagtgtgatagcgatggcgatctgatgccagtggggccacgatttgctccccgtctttatactggcttgactctatggtatctgtaaaagaagcggcgggttgataaatgataatttcataaagatttaatccaaaaaaaaaaaaaaaaaaaaaaaaaaaaaaaaaagaattc

SEQ ID NO: 23 - DNA, 1033 bp, synthetic construct
  misc_feature 1..1033: note = Artificial DNA standard
  source 1..1033: mol_type = other DNA
gatttaggtgacactatagaagtcctgcctgtcggtgttgcgcagactctcgttagcggggtgtgctgggtaaggtaacatctttataaccgtggcaattagtctatcaggaaacaatgacgaacagaggaatcactcactgtatacctcgatagcagaacggccttccgaagtgaccggctgacgtccagggttagcagatatctcattcaacaggaaatgacgggtggtagctgaaattttgactataattttctgatagctaaacctattatacaaagatacgtatggtaggcacatttccgtacttaaaaatgtaggagtactagctgttatgcataaaaaatttagaccgagtaatcctattcaggatcagcgtaagaacttgaccagtgacttcggaatgattgaaaataccaaattgggtaatttcgtgttcgaacaatgttagcgttgggcaacaataatgtgttaggttggctgtaatataaagtctaaggtagaggtgtaacaaaagattaccaggtctgcaacgtgatataatgctttcaccgacaagaattacaagttacaagggcacgctcttatatcgatcatagaagtacattaagctcagtgaaatcaaggctgcgactatgtgtcgggttcttcctcttaactcgtttaccttggatcgttttcacaaagtaacagaaggaaaagaaatactgagagttagacatagcagacattaacccgttggtagggacccaaacccggagacgctatataacccgtggacaacctctaatatcggctgtctcgcgctctctgcagctatcagaaaccgatttaggtaactctatcacgctgcccaaaaaatgaatagacgacgattaactctggagaggaccccacccccttccattctcgccagttctgtaagacgcttggttgaagcttgaatagtccgcactcgaagccagctgaatttgggggtattggtaaacaagtcatgaaaaaaaaaaaaaaaaaaaaaaaaaaaaaagaattc

SEQ ID NO: 24 - DNA, 662 bp, synthetic construct
  misc_feature 1..662: note = Artificial DNA standard
  source 1..662: mol_type = other DNA
gatttaggtgacactatagaagtcctgcctgtcggtgttgcgcagactctcgttagcggggtgtgctgggtaaggtaacatctttataaccgtggcaattagtctatcaggaaacaatgacgaacagaggaatcactcactgtatacctcgatagcagaacggccttccgaagtgaccggctgacgtccagggttagcagatatctcattcaacaggaaatgacgggtggtagctgaaattttgactataattttctgatagctaaacctattatacaaagatacgtatggtaggcacatttccgtacttaaaaatgtaggagtactagctgttatgcataaaaaatttagaccgagtaatcctattcaggatcagcgtaagaacttgaccagtgacttcggaatgattgaaaataccaaattgggtaatttcgtgttaacccgttggtagggacccaaacccggagacgctatataacccgtggacaacctctaatatcggctgtctcgcgctctctgcagctatcagaaaccgatttaggtaactctatcacgctgcccaaaaaatgaatagacgacgattaactctggagaggaccccacccccttccattctcgccagttctaaaaaaaaaaaaaaaaaaaaaaaaaaaaaagaattc

SEQ ID NO: 25 - DNA, 2675 bp, synthetic construct
  misc_feature 1..2675: note = Artificial DNA standard
  source 1..2675: mol_type = other DNA
gatttaggtgacactatagaaggagattatgcgtctaggtttgggaaggatactcggagatggacatacgagaaaagctcctcccgtggaactctagagggcatcacgaacggtgcggtagagaaagatatagcacctctggagcggagcgactggcccggagcagccacatctcgacagagcccgaagaaaccaataggaaagacgaaccagattcttgggtccctgcgtacagtccagaatcggtttgcgtgtgcatcgagggttggagcggtcctacgcgggaggagaacagtgtcgcttcatagtactggtcacggacacctatagacagtccgggctagtgatcccttttcctcagacgccaagaatcggtggtccacctcagcgagaagctctcaagatggagaccgaaacagcttgatcttggctccgatatcgcattgtacaccgctcctaccagacgcaagtgccagcctaggatcctcaaaagcagggtctcgcaatccgtaatctcaacggagacctcccgaggcctgccagccccttttatcgtgcggtcttcccgatgcgactctccggagtgggcgggttactcggcgtagtagagctcgattgagggcaattgatcactggacctacagggcgtccatcccccaatgacccggctcaaagaagcagtgcgtggggtggagaacgcgcgagtatattaagcccgagcgggatagagcaagggatcccgagtagtatcatgtaaagcaataggcctaagcatctcgtcaataacactcggcgctagacgtcaggaatagcggttgccaaccggtgtcgtgtgtgtatagcatcgagccgcttcccggcctctgaagacttctagctcactgaactcgagatcgctccatatagccacgcgatttctcgagactatagacaaagacgctgacggggttagaccttcggaaatgacgcatataaagatccttacgcatctagcagatcctagcgcgccatgagtggacagtcaaacgaatttgcagggccatgtctccattcttgcccccgtcagccgcacgtgaaaggcgctcgtgctctggcgttgggggtcgaaacctttgacccacccccaagggaaggcctgagcactgaagcccaggccctcctcggcatatgcccgcctcctttgggcgaccttccaccatgacagatttaagatgtaccggctgccggctgctccccgtcccctcgcgataactcagaggtcacctgagagaagggtagcacgagccgaggggcgtctgggtagggagggggcattagagtcggccgtgggaggaacgaagtcgaccagaacccgatgggaagatatcagcaagagaagacaactagagggtaattagtcctgcgtgagagccttacccaagctcacgtatacacgcagaaagcaagcctcaaaaacgagagacgccgtccaatgcgcccgttacgagagagggcctcgccgcagggaacgctctcccctcccctgcccccccgacaggacgccctcagcgaaacgcgataagaaaagaccccgaagttaaaccagaagcgtcatcgccgtgtttcagatagagagacagccggagctctcgtaaacgtcgcacgggcatgctactaacaggactcacgtgaatcgcagcgattggggttggtaggattaggcgaccggaagcagtcaccaatcagtccccccaacaataccgcattgcccgagcgagcaccaagcatttaggctacagccccgggtgcagggatggagcgcgtcccaagcgaagcccctcatgtccaactcgttgttgacataatcattgatgacgcgcctcgccaagctacgggcccacccagccctaccgtaccaactccacccaatcctcgaacaaacaatagttgcgcatttgggtgagagctgaaagaaccgaatggagagtgcgcgtaatgtagcaattaaaaacggattgccagcagacttgcttcggtgcacgccgccgtaacgacaataggctcgcagcagagatctcatacgttacgttccatcgtggaaacaacaagaagcaggccgagaagaaccgagaagacccgaaagcgacaggtcgccttgtataggcccttgttacttatgcaaccacaaatacactagggacacacgtggcttcccagcttgttgaagtgcatcctcccaagaaccgcgactgttgacgccttcaggagccatgaggaggcaatagaaggggcaagttaaataagataattgaattaaaaatatagtgattaacaagatctactggctgacctcccgcatcggtgcgatcggtctcggggaagaccatccccgaaagagtagatccttctactatcggcaatcctaatgaggggtaaattgaagcacaacaagattttaaaaataatatttatttaaaccttctcataatcagttcccctacactcctcacgaccccaaagcagacgagcgaaacacgttatttcgtagcagaccccagactagggattctgtcgcttcccatcgatcttacggaccagtaatactgtcgatatcgttaccctctcaggccgcaactgagaaatatacaaacctagcgctaaaaaaaaaaaaaaaaaaaaaaaaaaaaaaagaattc

SEQ ID NO: 26 - DNA, 2965 bp, synthetic construct
  misc_feature 1..2965: note = Artificial DNA standard
  source 1..2965: mol_type = other DNA
gatttaggtgacactatagaagcggcgagcccgtggttggagcgagcccgatcaccggcaggtgcagccccgtcgaccgccccgccgccccccccgcggcacacgggccggtcggagcctggccgccgcaggctcgcccggaatcgccgcgacacgcccaagcacggcggctgggaccgtatacatcgccagttaagccgcggaccaaaccggcggacggagggagagaaattaggccaaccgagcgccccgccgtgaggtccgtctccggacttccgcgcccgacccccgtacacgccagcaataacacggcaaagagcctgtgccccacaagccactacggagttaggcccgcagcgacgaacggtgcggtagagaaagatatagcacctctggagcggagcgactggcccggagcagccacatctcgacagagcccgaagaaaccaataggaaagacgaaccagattcttgggtccctgcgtacagtccagaatcggtttgcgtgtgcatcgagggttggagcggtcctacgcgggaggagaacagtgtcgcttcatagtactggtcacggacacctatagacagtccgggctagtgatcccttttcctcagacgccaagaatcggtggtccacctcagcgagaagctctcaagatggagaccgaaacagcttgatcttggctccgatatcgcattgtacaccgctcctaccagacgcaagtgccagcctaggatcctcaaaagcagggtctcgcaatccgtaatctcaacggagacctcccgaggcctgccagccccttttatcgtgcggtcttcccgatgcgactctccggagtgggcgggttactcggcgtagtagagctcgattgagggcaattgatcactggacctacagggcgtccatcccccaatgacccggctcaaagaagcagtgcgtggggtggagaacgcgcgagtatattaagcccgagcgggatagagcaagggatcccgagtagtatcatgtaaagcaataggcctaagcatctcgtcaataacactcggcgctagacgtcaggaatagcggttgccaaccggtgtcgtgtgtgtatagcatcgagccgcttcccggcctctgaagacttctagctcactgaactcgagatcgctccatatagccacgcgatttctcgagactatagacaaagacgctgacggggttagaccttcggaaatgacgcatataaagatccttacgcatctagcagatcctagcgcgccatgagtggacagtcaaacgaatttgcagggccatgtctccattcttgcccccgtcagccgcacgtgaaaggcgctcgtgctctggcgttgggggtcgaaacctttgacccacccccaagggaaggcctgagcactgaagcccaggccctcctcggcatatgcccgcctcctttgggcgaccttccaccatgacagatttaagatgtaccggctgccggctgctccccgtcccctcgcgataactcagaggtcacctgagagaagggtagcacgagccgaggggcgtctgggtagggagggggcattagagtcggccgtgggaggaacgaagtcgaccagaacccgatgggaagatatcagcaagagaagggagcaaaccgcaaggcccacggccaggagcagaaaacaactagagggtaattagtcctgcgtgagagccttacccaagctcacgtatacacgcagaaagcaagcctcaaaaacgagagacgccgtccaatgcgcccgttacgagagagggcctcgccgcagggaacgctctcccctcccctgcccccccgacaggacgccctcagcgaaacgcgataagaaaagaccccgaagttaaaccagaagcgtcatcgccgtgtttcagatagagagacagccggagctctcgtaaacgtcgcacgggcatgctactaacaggactcacgtgaatcgcagcgattggggttggtaggattaggcgaccggaagcagtcaccaatcagtccccccaacaataccgcattgcccgagcgagcaccaagcatttaggctacagccccgggtgcagggatggagcgcgtcccaagcgaagcccctcatgtccaactcgttgttgacataatcattgatgacgcgcctcgccaagctacgggcccacccagccctaccgtaccaactccacccaatcctcgaacaaacaatagttgcgcatttgggtgagagctgaaagaaccgaatggagagtgcgcgtaatgtagcaattaaaaacggattgccagcagacttgcttcggtgcacgccgccgtaacgacaataggctcgcagcagagatctcatacgttacgttccatcgtggaaacaacaagaagcaggccgagaagaaccgagaagacccgaaagcgacaggtcgccttgtataggcccttgttacttatgcaaccacaaatacactagggacacacgtggcttcccagcttgttgaagtgcatcctcccaagaaccgcgactgttgacgccttcaggagccatgaggaggcaatagaaggggcaagttaaataagataattgaattaaaaatatagtgattaacaagatctactggctgacctcccgcatcggtgcgatcggtctcggggaagaccatccccgaaagagtagatccttctactatcggcaatcctaatgaggggtaaattgaagcacaacaagattttaaaaataatatttatttaaaccttctcataatcagttcccctacactcctcacgaccccaaagcagacgagcgaaacacgttatttcgtagcagaccccagactagggattctgtcgcttcccatcgatcttacggaccagtaatactgtcgatatcgttaccctctcaggccgcaactgagaaatatacaaacctagcgctaaaaaaaaaaaaaaaaaaaaaaaaaaaaaaagaattc

SEQ ID NO: 27 - DNA, 942 bp, synthetic construct
  misc_feature 1..942: note = Artificial DNA standard
  source 1..942: mol_type = other DNA
gatttaggtgacactatagaagcctgcaacgcccctctatcacgcgagtgagggacaaggaacgtcaatgtggggagaagtaggtgacgctgtacccattgctcggtaccccaatccggagcctctagtattcctcagtgtgggttctaaccaatatggaagttgttacaggttgtatgaaattattcgccggacgtcagcacgcggtacagacctgagcatggtccggcaacggcgcacacacacccgcctagaatcgacagccacgaacaccgagttggagacgttacccgccctaggcagtggattggacaagttgagttagcttgacccccctggggagaaccaatgatcaccggaacttgtgttcaagccgacactgccgctccccggaggagctctcccggtactctgctgggacacgaaatgcagacctggtcctctctgaccggatgagcgccgagccaagaaaatggcagtgcatacgttccagagtgattccggtcctcgacacaactccatgtcgcggtgtggtccagcagtcgacagtgtgcgtgggcggggccgagccctcggcgcacggccgtcgccactgcagggatgacgcctttctacccttggcgtagcaggcgtgctggcgcatcgcaggcccttcctggctagcccgaaccaggaaccagccgcggttgggtcccatattcccatgcgggtcgtttgggcgtggtcggttccggcttgtgcgttggcgtggggggaggggaacgtagggcaccgtcccgtccgcttggctagttttcgattcttgctctctaggttgccccctacggccctccttcctcccccccgactctacggagccggaagcccccacctgtcccctggagaatgactctcgcgccccccgccaaaaaaaaaaaaaaaaaaaaaaaaaaaaaagaattc

SEQ ID NO: 28 - DNA, 948 bp, synthetic construct
  misc_feature 1..948: note = Artificial DNA standard
  source 1..948: mol_type = other DNA
gatttaggtgacactatagaaggcgactcttcgccgcaccagcggcgcctgcgcacaggtccccgacagtcagcgccccgccggagtggggcgcgaccgccgcgagcggaaaagcccaccccagaccatcccagtcgccgagcccccccccgcgccccgaccggcgccgggccggccctccccaggtcacagtgtgtccagataggagtgcgccggagacctgagcatggtccggcaacggcgcacacacacccgcctagaatcgacagccacgaacaccgagttggagacgttacccgccctaggcagtggattggacaagttgagttagcttgacccccctggggagaaccaatgatcaccggaacttgtgttcaagccgacactgccgctccccggaggagctctcccggtactctgctgggacacgaaatgcagacctggtcctctctgaccggatgagcgccgagccaagaaaatggcagtgcatacgttccagagtgattccggtcctcgacacaactccatgtcgcggtgtggtccagcagtcgacagtgtgcgtgggcggggccgagccctcggcgcacggccgtcgccactgcagggatgacgcctttctacccttggcgtagcaggcgtgctggcgcatcgcaggcccttcctggctagcccgaaccaggaaccagccgcggttgggtcccatattcccatgcgggtcgtttgggcgtggtcggttccggcttgtgcgttggcgtggggggaggggaacgtagggcaccgtcccgtccgcttggctagttttcgattcttgctctctaggttgccccctacggccctccttcctcccccccgactctacggagccggaagcccccacctgtcccctggagaatgactctcgcgccccccgccaaaaaaaaaaaaaaaaaaaaaaaaaaaaaagaattc

SEQ ID NO: 29 - DNA, 1176 bp, synthetic construct
  misc_feature 1..1176: note = Artificial DNA standard
  source 1..1176: mol_type = other DNA
gatttaggtgacactatagaagccgtcccaagggcgcccgccgcgaccgtgagccggcacccccgaccggggcggcgccgcgtccgtcgtgctggtcctccgccacgagtccgcattcggtgaaagagcggcggcggaccggggggcgatactgcttaccgcgccgtcgcacttggtcctcgtttccgtgttccgcaagtgttatagacggcataaaccttgcggaagggcgaactgggacacactgaccgtcccccgagcaatacgtcaaccaagacgcgctgagaggcaccgtatgcggaatggacgacgggcggcctcagagcatgataaggcatagaggccaacatggacacccgtcgcgtcctccccacagtccgaggacggtcgggggtttcaggctgcgaaggacccttcaccgcagtgtcgatggcacggttcgacggcaggagagctgtggggtgcatgtccgctgtgtcgagcttctgcacgactatcctccctccaaattacaaactatagaccccaactaccgacacacattcatctcactcaggcggccacaatcgccacgaacacgcgttcgaggatgcgagacccacaggtcatggcctcgccccttgttccacccagatctgtcaccgtgaggtggaagatcctggtctggcggtacacaccggacggttagggaccgaacaatgttggcctgaggtttggacagggaatggttctccggatagcacctcgacttatcggcgcggcacacccctagaactcgtcgtaccgggacgcattcgctctgccaccaggacaagtcctcgacacgtctttcaagagtcatacctaaatgctccaacgccctaccgccacaggacaatggacgcgcaggtccacttacgtgaaacggtcctatggtttgcaactcgtgatcgccgaggtactgccattgtactcgcttcacaacacgcgtgttggtttgacgcccgacccatttggcgcacgagcgttgtgactctttagatataaattaccagacgaacagtataaataaagacagcctatcacacatccacatgcgtgcggggacaccttccgctccccccagctcaatacaaacaccggcaccgtaacctttagccgaaaaaaaaaaaaaaaaaaaaaaaaaaaaaagaattc

SEQ ID NO: 30 - DNA, 1562 bp, synthetic construct
  misc_feature 1..1562: note = Artificial DNA standard
  source 1..1562: mol_type = other DNA
gatttaggtgacactatagaagccgtcccaagggcgcccgccgcgaccgtgagccggcacccccgaccggggcggcgccgcgtccgtcgtgctggtcctccgccacgagtccgcattcggtgaaagagcggcggcggaccggggggcgatactgcttaccgcgccgtcgcacttggtcctcgtttccgtgttccgcaagtgttatagacggcataaaccttgcggaagggcgaactgggacacactgaccgtcccccgagcaatacgtcaaccaagacgcgctgagaggcaccgtatgcggaatggacgacgggcggcctcagagcatgataaggcgcgcagcgggttagacgtgactcgcagcctcgctacaagccgaggaacccgcggtgcacccatccacaggcatagaggccaacatggacacccgtcgcgtcctccccacagtccgaggacggtcgggggtttcaggctgcgaaggaccaggctctagctggcgcggtggtaccattgcggccagcttcaccgcagtgtcgatggcacggttcgacggcaggagagctgtggggtgcatgtccgctgtgtcgagcttctgcacgactatcctccctccaaattacaaactatagaccccaactaccgacacacattcatctcactcaggcggccacaatcgccacgaacacgcgttcgaggatgcgagacccacaggtcatggcctcgccccttgttccacccagatctgtcaccgtgaggtggaagatcctggtctggcggtacacaccggacggttagggaccgaacaatgttggcctgaggtttggacagggaatggttctccggatagcacctcgacttatcggcgcggcacacccctagaactcgtcgtaccgggacgcattcgctctgccaccaggacaagtcctcgacacgtctttcaagagtcatacctaaatgctccaacgccctaccgccacaggacaatggacgcgcaggtccacttacgtgaaacggtcctatggtttgcaactcgtgatcgccgaggtactgccattgtactcgcttcacaacacgcgtgttggtttgacgcccgagtaccggtgggtcgtatcactaaccagcccgggggttgcggggcgtcatccccctatacgcgccagcggctcccgcagcccatttggcgcacgagcgttgtgactctttagatataaattaccagacgaacagtataaataaagacagcctatcacgtcccacttgggccgaagcttggcctgcgcgcagatatgcctgagtgacctgcctttggtcgcgaccagcacctccgcgcgccccccccagcaaacggacgtcccccgcagcacagctcggcgctgcgcaacgtgggcaccacagagatgggcctccccgagtggcgctcctccctcgatttgcccgctcctctcctagagacatccacatgcgtgcggggacaccttccgctccccccagctcaatacaaacaccggcaccgtaacctttagccgaaaaaaaaaaaaaaaaaaaaaaaaaaaaaagaattc

SEQ ID NO: 31 - DNA, 2044 bp, synthetic construct
  misc_feature 1..2044: note = Artificial DNA standard
  source 1..2044: mol_type = other DNA
gatttaggtgacactatagaagccggcgcacgccagggtcgccccgcgcctccgccgccgggcgcacaagccgcgtctccctccctgggggtggcggccgcccgccggcccggcgcgcctagggcgcggcggtccatgaacggctcgctaccaggcaggcacttaggcagcctgatgttgtagcgttaagaatggccgagcggaagcggttaacagcctccagccgcgaaccaaaccccaagggatgagaacggccaattacccaaatgtacacaacactcccacccccgtgctcccaccaccggccctctaggaccgggcgacaacgagttagcaccgttgtctccgccccacggctttgcccagcacacctcgcgcctctacactgaccgactaggcctgaccacctgtcagcctgctcctaagaccgcacgaatagcccgtagtttccccgccgcgtcaggacgagccggccactgggggcataatcatcaggccgtagacgagctttcgtggcccctcggccggtccgggtgcaacggccccggtccctggccgactggacaaccaatcccctggtgtgatcggcaccgaacttgcgccagccacgtgccctcaagagcacgggactgccctgcaccgacccgcatccctcaccccgtagacgccgcactccaacctgtagcgggaaaaattggcagagtactgtgccatcgcaacgatgattaaggagaaagagcagcaacgcccaggcaaagaaaaagggacgacaaaaccactcaagcaccgagcggaacagcctaatcgcggactggcgcgtatcgtaactccggcctaacatattcgaagcatgagcaggcacccccgcagcttcgaccgttatcgtgatactgtgagccctctggcacaggtaccagcagaagcagggtggaaagagcgaagaagaagctaccgcgagaagaagatgaaaataagaccgtcaggctttgcagcgcaggcgccccggccctagacacttcgccatagggatccgaacgctgaaacaaaggaccgagcactccacccacgccgactcccacaatcacacgtagatgtccgcaatgacccacgcgtcctccagtcgtccgctagtgcagcccctcggagttcccgcactccgttcggacccgcgcgggctactgggccgtccccgcggcggctccgtgcgataatcctcccaggcccgttccccgccgcacgctgctccccctcgcatccaccccgcgcctcaagtcgaaatccgctcccggactgacgcccccgccccccctggttccacgtattatcacgcacgactccccctccccgccccactctaacggccctcgccgcctgatcgtcaggcgggatgcacgcgacgcccccacacgttccgaccctaggctgatacccgtcttcatcgctatcgtcgccgcccgagatagcccaacccacctccctccgcgccagatgggcccaggagagaatagggtgcaccgatcgcgggcccgaatcagcgttccaggtcaagagcactccgccctacgggcactaccccattccttcccaccccctcgttactagtccgacgcagacgttcactggcgcccagaggtaggggagccaataaacggaagaacgtggccgagggacgtgccagctacgggcatgagcgcaaggaccctcgggcagggctctcacgctccccaaccttctctccgtaaagtccgccaagcgctggccaaagaactacccagcacagccacccccccatgcgtaagcccccgagttaacggtggagtcgcttccctcgtcccgccgccgttaccctgtatgattcaccccgtggcctagtgcaacgtaccacgcggcccgccctcgccgccccgaagccccgggcggccggtcgtcagcatgagtgcccatagaccgccacgcgcgtaaacaccggccgagccgccgctggcttttgcgtgtcgacgaacaattgaaaaaaaaaaaaaaaaaaaaaaaaaaaaaagaattc

SEQ ID NO: 32 - DNA, 2027 bp, synthetic construct
  misc_feature 1..2027: note = Artificial DNA standard
  source 1..2027: mol_type = other DNA
gatttaggtgacactatagaagggcagtagatcagctgaagtagtatcagtggttattgtcacgaactatcttttttcgtctttcgctccattttaaagcgggcatgtccgtggccggccagacctgcggagttggtctcctcctctcggggtctgctccggtggcgatcggtaaattggattacgtctcaggactcatctattgcgggctcgtcatgagagaagcttaggcagcctgatgttgtagcgttaagaatggccgagcggaagcggttaacagcctccagccgcgaaccaaaccccaagggatgagaacggccaattacccaaatgtacacaacactcccacccccgtgctcccaccaccggccctctaggaccgggcgacaacgagttagcaccgttgtctccgccccacggctttgcccagcacacctcgcgcctctacactgaccgactaggcctgaccacctgtcagcctgctcctaagaccgcacgaatagcccgtagtttccccgccgcgtcaggacgagccggccactgggggcataatcatcaggccgtagacgagctttcgtggcccctcggccggtccgggtgcaacggccccggtccctggccgactggacaaccaatcccctggtgtgatcggcaccgaacttgcgccagccacgtgccctcaagagcacgggactgccctgcaccgacccgcatccctcaccccgtagacgccgcactccaacctgtagcgggaaaaattggcagagtactgtgccatcgcaacgatgattaaggagaaagagcagcaacgcccaggcaaagaaaaagggacgacaaaaccactcaagcaccgagcggaacagcctaatcgcggactggcgcgtatcgtaactccggcctaacatattcgaagcatgagcaggcacccccgcagcttcgaccgttatcgtgatactgtgagccctctggcacaggtaccagcagaagcagggtggaaagagcgccatagggatccgaacgctgaaacaaaggaccgagcactccacccacgccgactcccacaatcacacgtagatgtccgcaatgacccacgcgtcctccagtcgtccgctagtgcagcccctcggagttcccgcactccgttcggacccgcgcgggctactgggccgtccccgcggcggctccgtgcgataatcctcccaggcccgttccccgccgcacgctgctccccctcgcatccaccccgcgcctcaagtcgaaatccgctcccggactgacgcccccgccccccctggttccacgtattatcacgcacgactccccctccccgccccactctaacggccctcgccgcctgatcgtcaggcgggatgcacgcgacgcccccacacgttccgaccctaggctgatacccgtcttcatcgctatcgtcgccgcccgagatagcccaacccacctccctccgcgccagatgggcccaggagagaatagggtgcaccgatcgcgggcccgaatcagcgttccaggtcaagagcactccgccctacgggcactaccccattccttcccaccccctcgttactagtccgacgcagacgttcactggcgcccagaggtaggggagccaataaacggaagaacgtggccgagggacgtgccagctacgggcatgagcgcaaggaccctcgggcagggctctcacgctccccaaccttctctccgtaaagtccgccaagcgctggccaaagaactacccagcacagccacccccccatgcgtaagcccccgagttaacggtggagtcgcttccctcgtcccgccgccgttaccctgtatgattcaccccgtggcctagtgcaacgtaccacgcggcccgccctcgccgccccgaagccccgggcggccggtcgtcagcatgagtgcccatagaccgccacgcgcgtaaacaccggccgagccgccgctggcttttgcgtgtcgacgaacaattgaaaaaaaaaaaaaaaaaaaaaaaaaaaaaagaattc

SEQ ID NO: 33 - DNA, 721 bp, synthetic construct
  misc_feature 1..721: note = Artificial DNA standard
  source 1..721: mol_type = other DNA
gatttaggtgacactatagaagggattggcccctccgcaacgattgggcaccgccccccctctacgctctcggtctcgaatgttcttggtctttcttatggcggacagctcctgggtaacgcagccttactacccggcgaatagtagtggatgtcagagtggttcatctcaagtggagcggcatggcaccattaggcggggcggcgcgcaagagacgccagcgtgtaagtgaaccactcacgcgccagcccagtgcgcatcgaacgggcacacagtccgtggcgggctccctcgaaaacgaccgcgatcggatggtgattgcagcatgcctcggccggcttaaactcggcccatccgcaggactctgcacatagccccatctcgctcgagcaacctagccacatcgcccgccccctggggcctcgagtcgaccgtgctccggctcctcctccgtccgccaaccacagtagtatcgtgcctcaggacctaccccgcgcgcgttcacaccaacgaccgcagctctggaccccacgcccctgttgcgggtgccttggctgcgcataccgccccccgctcagcttcggccatagacggcactccgacccccgccactctacagggttgccggcccaaggtccgctagcagccggcgcagatcggcatgtggaaggggccgtcccccttgaaaaaaaaaaaaaaaaaaaaaaaaaaaaaagaattc

SEQ ID NO: 34 - DNA, 593 bp, synthetic construct
  misc_feature 1..593: note = Artificial DNA standard
  source 1..593: mol_type = other DNA
gatttaggtgacactatagaaggccccgtccagcggctccgtaccattcggcgcgctgctcagcatatgcatcgcccccctggccgccgcggggcctgggtccaaaaccctcaaatgacgacagctcgacacccgtcgtcttgggcgacgccgtcgagactccccacccactgctatcagtgggtggaccagatgtgcggggtgctccggagagactccaaccctgacgaacccagcggcgagtgacccttagcgcgctccgccattaggcggggcggcgcgcaagagacgccagcgtgtaagtgaaccactcacgcgccagcccagtgcgcatcgaacgggcacacagtccgtggcgggctccctcgaaaacgaccgcgatcggacacatagccccatctcgctcgagcaacctagccacatcgcccgccccctggggcctcgagtcgaccgtgctccggctcctcctccgtccgccaaccacagtagtatcgtgcctcaggacctaccccgcgcgcgttcacaccaacgaccgcagctctggaccccacgcccctaaaaaaaaaaaaaaaaaaaaaaaaaaaaaagaattc

SEQ ID NO: 35 - DNA, 1013 bp, synthetic construct
  misc_feature 1..1013: note = Artificial DNA standard
  source 1..1013: mol_type = other DNA
gatttaggtgacactatagaaggagccggcatacttagcggcccggttgccgccgcgcgccggcacgcgctagcgtctgtccgcgtcgcccggcgctcgctctgtggcttctaccgcgaagcttgtgcgtcgccagacctccgcccccggcccctgggccgcggcccatcgcgatgcgacggcggcccggagtacagcccccacactaacggataagataccgccacccgctcgtcgcgtctgtgcgggcacccgcacccaacagtccgcgtcgcctgtgtccgacactccgtcgatggagctcccccaaccatcgacgaacggccgagctatgtgcgcggaccatccagctcaggccccaagcgcctagcggtgtgcaactttggcttccgggtccaccggttgttacccctacatgagtgccgagtttgtcgggccgatccgacggcccgttaaccacgctcaggcgacacccacctgagtgcctcgggccccgatcggtgagcgcgcccgcgacggacgacgcgcgagccaatagctgccacgctaccgtcgtcgacccggtgcgcataccgggccctgcgaccaccccacgtgccggttaagcccgccctccccgcaccacgctacttcccgctccccctcggtcccccccacccccgcgcccaaccccctcccttgcgcggccgaattactagcaggcgtctaacaaactgacaccacgtacagacggaaaaacaccaacctcggccgtacctccggcacccttcggacctctgtgccaccacctctaattcgcaagcccacgggcacaagctaacacaagcggaatgaggcctcggaaacgcccataccgccggggtgtgaggttcgttttaattgtctcgcggttccggatgaccagttgctcacatacggcgacgtatgtcaggtccggctgcgctctcctgacgccctcgggcttcgcggctctccataaaaaaaaaaaaaaaaaaaaaaaaaaaaaagaattc

SEQ ID NO: 36 - DNA, 685 bp, synthetic construct
  misc_feature 1..685: note = Artificial DNA standard
  source 1..685: mol_type = other DNA
gatttaggtgacactatagaagcgtctgtccgcgtcgcccggcgctcgctctgtggcttctaccgcgaagcttgtgcgtcgccagacctccgcccccggcccctgggccgcggcccatcgcgatgcgacggcggcccggagtacagcccccacactaacggataagataccgccacccgctcgtcgcgtctgtgcgggcacccgcacccaacagtccgcgtcgcctgtgtccgacactccgtcgatggagctcccccaaccatcgacgaacggccgagctatgtgcgcggaccatccagcgtgtcgcaccgcccctctcttcagtccccccgtggaccgctcactgaacgctcgcactgccctcctaagccatcttagtcaggccccaagcgcctagcggtgtgcaactttggcttccgggtccaccggttgttacccctacatgagtgccgagtttgtcgggccgatccgacggcccgttaaccacgctcaggcgacacccacctgagtgcctcgggccccgatcggtgagcgcgcccgcgacggacgacgcgcgagccaatagctgccacgctaccgtcgtcgacccggtgcgcataccgggccctgcgaccaccccacgtgccggttaagcccgccctccccgcacaaaaaaaaaaaaaaaaaaaaaaaaaaaaaagaattc

SEQ ID NO: 37 - DNA, 2394 bp, synthetic construct
  misc_feature 1..2394: note = Artificial DNA standard
  source 1..2394: mol_type = other DNA
gatttaggtgacactatagaaggtggcctacggggaaccagtagggacggccacgcgggaaaaggcgatcagacccacctggcctagagacagaccaggctataaccaggaactccggtggaggctcggcgcagctttggtccacgcgtatctgaaaagcttacacgaccggctttgaaaccaccgcaatcaaaaagggagaatgtcaaaccctccgcaacaggtgaaaaactagcagagtttaaacattgtgtcgagactaaaaacagcccagaaagcaaaaggaacgaccctccagcacggaaaaacaacgaaggaataaaccccaagattggaaattcaacttcgcgaaaaagtgctccacaccagaaaattcgggcaaagaaagacctactcacaagagaaggtcctatagttacggtgctggttgttaatggaattaatagccagatagaacacagagaggaaatcggttaacaaatgcaacgtaaacctaaagttgactcctacacatagcgaaatgcctgtaggtgaaagtaaaggatgaaatatcctaatccatacatacagcgaaagcgtgattgttgaacgaagaagggaaacaggccccggctctttgaatccaggagtaaccaggcttcaagcatggcaatcttgacgttcactcaagcatgtctggccttgtaccccaaaaggaatacactcaaggtggggaaatattgagaagatagacaatatccatgaggctcagccagggatacacactccaacacggcggtgatcgaagaggtagaaaaaaaagggtaatggaatatcaacagcgacgctgctcttgggattcccgcgatcgcgcgaggcacccctaaaaggatcagtcgacatgtctccacgctgagcagaaaggtgaaaaaaagagcacaacgaaatggataggaggattgtaaggggatcaggaacttatcacagactcatcgaaatagtagcaaccacagaaaaccatatatgaaaggtcaaagtacggaaccccgctgaaagcaaagaagcgcataacttgcgcacttttgagttatgaataaactgtcgctgtcaggagtaaacgatgtaaatgcaaccaaattagcacacaaagaagacacggtcgagatccgcctgtacaggtgggggcgattcgcctctttgcactttgataattacctcgggaggtcggcccactccaggacccactttcgcctaagtgcaaaaggcggtaggctggtgagtgacaccaattgcgtaataagagcgactggagaggcacggagatcaacggtaaagaatcataaattgaggacgacgggaacaagaacaacggaagaatagaataatggagtacgaggaagttctaactcaatcgttcaagacaggaagatgagattaacgggtctgcagcaaacaataaatggccacaaaataggtgcaaaactccgttacgcgaaccgtctacttatcgttatcctgcgaggtattttgggccgtaacataccgtactttcagctttctagagttactacattaagagattaggtgtcgtccatgtcttagccacagttctaccaacgatcccccccccccggatcgcccaaaacgcactactggcgtgaacaataaacggatgcgcctgcctcgtactggcatttaaatagtcgacctcagtgccgaaaagagcgtagagacaacacacacaaaggaagaaaataggaagttatagaatacacctaaagaaaggaggcaggaatagaatgcaaagggtgcataaccacctaaccttcatagctgtgaaatagcattgaccaggcacgaccagaacaatctaaaccggaaaaaggttaagatcaacagacggacaacacgacaattggcacacgtgagtatcacatccaggtctcgactgtctccctgacagccttcataacgcagccccaaaaagcaaaaagcggataatcagtaatcgcgagtgaacaaatcgcaaaccccatgcgagggggcaagcttagaatatgagacgaagagtaaccgaacatacgcacaaaaaagtctaacaaaataaacggtggaactatagtgtataaatctgttaaatacgcgcttctttgaagggtatcgtggtgtggataaggcgcacaaaataatgctgtcgattcgagttggaaaataggtgttatatctgtatttaggtgatatcgctttaaatattacccgttccatgtttttaaattgtcatcgtagtctagaagatatgtaatggttaaaactgtacttgatcgtttttatttattgcactgctaagaacaggatatttggtgacattatatagtatgtaaaaaaaaaaaaaaaaaaaaaaaaaaaaaagaattc

SEQ ID NO: 38 - DNA, 1564 bp, synthetic construct
  misc_feature 1..1564: note = Artificial DNA standard
  source 1..1564: mol_type = other DNA
gatttaggtgacactatagaagctgttcgcacacagtcctagagtcctcattccagctgtttgcccgtcgatcaaggggcgagtagttatgcccaccgcccttgaactattactaggatctggcgctgtcactcgagttgcctgatcggcaagtgttatgatctcctacgtctggtcgtgaagctcccggtgcgccaacagatagggctcattgttagagggagaacaagagggaggacccacttcgccgagtatctaaatcaaaaaaagagcacaacgaaatggataggaggattgtaaggggatcaggaacttatcacagactcatcgaaatagtagcaaccacagaaaaccatatatgaaaggtcaaagtacggaaccccgctgaaagcaaagaagcgcataacttgcgcacttttgagttatgaataaactgtcgctgtcaggagtaaacgatgtaaatgcaaccaaattagcacacaaagaagacacggtcgagatccgcctgtacaggtgggggcgattcgcctctttgcactttgataattacctcgggaggtcggcccactccaggacccactttcgcctaagtgcaaaaggcggtaggctggtgagtgacaccaattgcgtaataagagcgactggagaggcacggagatcaacggtaaagaatcataaattgaggacgacgggaacaagaacaacggaagaatagaataatggagtacgaggaagttctaactcaatcgttcaagacaggaagatgagattaacgggtctgcagcaaacaataaatggccacaaaataggtgcaaaactccgttacgcgaaccgtctacttatcgttatcctgcgaggtattttgggccgtaacataccgtactttcagctttctagagttactacattaagagattaggtgtcgtccatgtcttagccacagttctaccaacgatcccccccccccggatcgcccaaaacgcactactggcgtgaacaataaacggatgcgcctgcctcgtactggcatttaaatagtcgacctcagtgccgaaaagagcgtagagacaacacacacaaaggaagaaaataggaagttatagaatacacctaaagaaaggaggcaggaatagaatgcaaagggtgcataaccacctaaccttcatagctgtgaaatagcattgaccaggcacgaccagaacaatctaaaccggaaaaaggttaagatcaacagacggacaacacgacaattggcacacgtgagtatcacatccaggtctcgactgtctccctgacagccttcataacgcagccccaaaaagcaaaaagcggataatcagtaatcgcgagtgaacaaatcgcaaaccccatgcgagggggcaagcttagaatatgagacgaagagtaaccgaacatacgcacaaaaaagtctaacaaaataaacggtggaactatagtgtataaatctgttaaatacgcgcttctttgaagggtatcgtggtgtggataaggcgcacaaaataatgctaaaaaaaaaaaaaaaaaaaaaaaaaaaaaagaattc

SEQ ID NO: 39 - DNA, 883 bp, synthetic construct
  misc_feature 1..883: note = Artificial DNA standard
  source 1..883: mol_type = other DNA
gatttaggtgacactatagaagatggatgggtgtgggaatggcatccggccaactgtagtcgggttctcttgactcggaggaaatgcttagcctgtgtgacgaggtttgcgcccgagcgcgatctccgtacggagatggtagtcgcgacataggccatgtgcgagccgtaggctcgggccaatcacagcaccctcatcgatactccgttgtacttagatcgtacctacagcgagccgatcgagatttggtgtacagtttgtggaacaagcagtttccaatctaccgcacagtgacgatgcgccagattatctcatcagcagcggatcgatagagctggaaaaatatcgttaagtgacgaatacccggctgcttcgtcgttcacaacttctgccgaccgctacccactcactgtcgtgacagagacgcctctacaacgtcacgctgtagacctcacaagggctacggataggataataccggggcattcgtatttgattaccaggccacgcctttcctccaagtcttccgagagtcaggctacccgaacgatacttacttagataacctagtcccggccacgacaaagacgaccgaacttctgttaagaccttaaaggaactacaaacgaccccctaaggatccgcggacaagccggcgcctcaattttcttccccggtggcccgagttttcttattatgccttatattatttttgtccgttgtggtctctgtatggttactgttaatatctctggtattttggttcgtttgtttattctgtaaagttccctatttttgttactaatgattactgacggcttgtatttattatatgtccttaaaagctaaaaaaaaaaaaaaaaaaaaaaaaaaaaaagaattc

SEQ ID NO: 40 - DNA, 534 bp, synthetic construct
  misc_feature 1..534: note = Artificial DNA standard
  source 1..534: mol_type = other DNA
gatttaggtgacactatagaagcttcgttcttcggcccttcgatgcccacgcggctagtccctggaacacccagaggactgcccccacggaccccccgactgtccgcccgacgggcaaacggcgttggaaggcccggtcggtggggcgccggcgagcagaaatcgtacctacagcgagccgatcgagatctacccgaacgatacttacttagataacctagtcccggccacgacaaagacgaccgaacttctgttaagaccttaaaggaactacaaacgaccccctaaggatccgcggacaagccggcgcctcaattttcttccccggtggcccgagttttcttattatgccttatattatttttgtccgttgtggtctctgtatggttactgttaatatctctggtattttggttcgtttgtttattctgtaaagttccctatttttgttactaatgattactgacggcttgtatttattatatgtccttaaaagctaaaaaaaaaaaaaaaaaaaaaaaaaaaaaagaattc

SEQ ID NO: 41 - DNA, 1046 bp, synthetic construct
  misc_feature 1..1046: note = Artificial DNA standard
  source 1..1046: mol_type = other DNA
gatttaggtgacactatagaagttacttcaatgtcccatctcgttacgtccattgtctgtcgtcgttttctgtttcctaccctttactctttgtatgttccgaaccgctctgcgatcacgaacatacaaggcccaacgcgccgcgcagcctgaccccgtgcggcggcaccgggccccgaaacgacgggcggcaaatgggcgggcggcctgtcgggggatgatggcactagggggtccttgtgagtcgccgcggcgccctcggtgcccccctgctggccggggggccacgagccaaggagtctgcgtagacgcatgactagtatcactggccgttccgtgccagttaccaacgcgcaccctcgcgccgtgcctgaaagtcagcaggcgaagagtgcacggatagtcgcacttccatcgacaggttgttgaacaccactagctcaatgcgcgaagggtctgcaaaggggacctacgccggtcaggcgcccgcggcgcgcggctggtctcacacggcgagttcacatcgcagggccacgcccgacggctgcatgggtagcccggctgcagtcctgtgacgggccttattgctgtccatcgacgaccccggcgacgccacgcgccacgggagcgataggagagcaatggtcgttccgccggtcttctaccccggcccgatgtagctcgccggcgaagacatgccggaagatatcctacgggactgcgacaccccggcctgggcggagattcagctgagcgcagctgggggacgggacactcgttgttctcccaaactccgcgtttacgagatggcacggagcctgtatagagttccttctttgagtcattgtaagattacaatttatggtgcttggatatcatcaaggtgttcgacgataaattgttactttaatttagttatgcagattctgaaagttacccgtaacattattttgggggggctatatcacttaattttattaactagattattatgattattatatggagagaaaaaaaaaaaaaaaaaaaaaaaaaaaaaagaattc

SEQ ID NO: 42 - DNA, 1285 bp, synthetic construct
  misc_feature 1..1285: note = Artificial DNA standard
  source 1..1285: mol_type = other DNA
gatttaggtgacactatagaagttacttcaatgtcccatctcgttacgtccattgtctgtcgtcgttttctgtttcctaccctttactctttgtatgttccgaaccgctctgcgatcacgaacatacaaggcccaacgcgccgcgcagcctgaccccgtgcggcggcaccgggccccgaaacgacgggcggcaaatgggcgggcggcctgtcgggggatgatggcactagggggtccttgtgagtcgccgcggcgccctcggtgcccccctgctggccggggggccacgagccaaggagtctgcgtagacgcatgactagtatcactggccgttccgtgccagttaccaacgcgcaccctcgcgccgtgcctgaaagtcagcaggcgaagagtgcacggatagtcgcacttccatcgacaggttgttgaacaccactagctcaatgcgcgaagggtctgcaaaggggacctacgccggtcaggcgcccgcggcgcgcggctggtctcacacggcgagttcacatcgcagggccacgcccgacggctggttaacaatgtcaacggcgtaacccacagagggacagcccttcatttgtcgggaggccgggaacagggaccctcatcctcatggcgccctgttagacgcaggtttgcctgctcggcgccagtgggctatgcagggtgcgcgactactacgggaccacgacgttccgtgtggggtgccgagcggcgacgcctggttcccggccttgtcaactgaccttgtccccatcccgttacttcgagcatgggtagcccggctgcagtcctgtgacgggccttattgctgtccatcgacgaccccggcgacgccacgcgccacgggagcgataggagagcaatggtcgttccgccggtcttctaccccggcccgatgtagctcgccggcgaagacatgccggaagatatcctacgggactgcgacaccccggcctgggcggagattcagctgagcgcagctgggggacgggacactcgttgttctcccaaactccgcgtttacgagatggcacggagcctgtatagagttccttctttgagtcattgtaagattacaatttatggtgcttggatatcatcaaggtgttcgacgataaattgttactttaatttagttatgcagattctgaaagttacccgtaacattattttgggggggctatatcacttaattttattaactagattattatgattattatatggagagaaaaaaaaaaaaaaaaaaaaaaaaaaaaaagaattc

SEQ ID NO: 43 - DNA, 1972 bp, synthetic construct
  misc_feature 1..1972: note = Artificial DNA standard
  source 1..1972: mol_type = other DNA
gatttaggtgacactatagaagcccctggtagaacatctgctattccttgttaaatccgactatttaggcctaacgggaatgatggtctctactcccttgtagagggtagggtccttttataggtgagtacagcatgattttgagcgaatcaaatatatgattacgaacctaccaaccttgagggccccaaagaaggtacttatccttgctatacaggcagttctcacgcatcagtctcacggtgctaaacaccaagtgccatcaggagttatggccatgatatgcggcgagaagaaaaagagtaagtccgcagagcgtagaaacataggggaaggcagccaaagacgtccattaaagggtggcgaaccgcagagatgagggcggcgacgccgccgccactagaccgcaggaagaggacggcaacatcacgtgaggggtgaaggggataaatgccggcaggctggacaggtcgcaaagacgagagaaacgggtccgtggtccaaaccaaaacacatccacgacccaggagggataggctgtgcgaggggggctagctcccaggtcttcaaccgtacgacgaagacaggaactggcgttctaacgccggggagaggaaaactccctggaaaggccccgaacgattaacagtagttcgacgtacaacaagaccgtaaagagcagatacgcaacaatgaaataggacaaaggaaacgaagagaattacgaaatagaaaaacggacgcaaaactgagggatgaaaaccgacggatacctctgactgccgctcggcgtaccgttagaatgagggagagaaaaagaaagacagaaagcggaatgtcatgctacgtcaaaggaggtacggggaagcaaatcgaagagtggaaaacaaaagaaattgagtagcttcatctgccataaaaaacagcatgctgcgatgttaaacgatgaaatgttacaaggtgagaaaatgaagaaggtgactcacggatatttacgaaaattaccccacaactataatcgtcgaatgaacgcgtggggcaacggggcccccggcgaggtgaacgagatgagccgggagcccagtggccgcgcacaaggaggctggtagacactgtccaggggatacggctacgccgggagaaagggtcttcacacgagagcgaagaccccagggaagggtgaccgagcatgtgaaaaggtaggtgaagaccgcaggggtgcacggtataccgtagggggaaatagagcaagaaaggattaaaatgggggaaaggaacgcccaagaaggggggcacggagaaaaatgggaggagcagaagtgaaagagaaagagaagatggtgaatccacacacgggatctaaagccggtgttgagaagaaaaacataccctatagagacggatgtttaccgcttgtccataaaacgctttcattactaatgaacggaggaagtgctcattagtaataggagaagatcaaaagtggtacgttcacgcccaaactactcccgaaagagtgaaataggacgtgggatcaatgccatattcagtgcagcaggagacacaaatacacgacagaatcggacacctcgcgagatgaccgttggccctgagtatttctacgtctaacgagggtgaagaacgtcgtgtgagtattgtcacagtaaagcagccacgaaccatcgaccccataagatgggggaatatagggtatcaccccatcagcgtatctagtgggatacactaactaaaacagttggcccctctccaaaagtacaacgcggcttaacctaggcttgatgaggctacaacgaggcagtcagccgcaaggaactctgtacgcgtatcaaagaagtgactcacctatcagaccctaggggactggaataatcaatcgtcgaaaccaccacgagcagagagtggtcatgaaggtacgaaaaaaaaaaaaaaaaaaaaaaaaaaaaaagaattc

SEQ ID NO: 44 - DNA, 2923 bp, synthetic construct
  misc_feature 1..2923: note = Artificial DNA standard
  source 1..2923: mol_type = other DNA
gatttaggtgacactatagaaggctccccgttgctcggccccttccgccttgatctgtctagtgtcgtcatcataacctatttgccgcttggagaataagtcccggattccacacgagatatcatgattttgagcgaatcaaatatatgattacgaacctaccaaccttgagggccccaaagaaggtacttatccttgctatacaggcagttctcacgcatcagtctcacggtgctaaacaccaagtgccatcaggagttatggccatgatatgcggcgagaagaaaaagagtaagtccgcagagcgtagaaacataggggaaggcagccaaagacgtccattaaagggtggcgaaccgcagagatgagggcggcgacgccgccgccactagaccgcaggaagaggacggcaacatcacgtgaggggtgaaggggataaatgccggcaggctggacaggtcgcaaagacgagagaaacgggtccgtggtccaaaccaaaacacatccacgacccaggagggataggctgtgcgaggggggctagctcccaggtcttcaaccgtacgacgaagacaggaactggcgttctaacgccggggagaggaaaactccctggaaaggccccgaacgattaacagtagttcgacgtacaacaagaccgtaaagagcagatacgcaacaatgaaataggacaaaggaaacgaagagaattacgaaatagaaaaacggacgcaaaactgagggatgaaaaccgacggatacctctgactgccgctcggcgtaccgttagaatgagggagagaaaaagaaagacagaaagcggaatgtcatgctacgtcaaaggaggtacggggaagcaaatcgaagagtggagttgattagagcggaacggacaataaggcgcaaaaagagattagctcggaggaaaagtacggttggaaaaaaagatttacacaagcaaaaggaaggctgatcggaaaagtataaggggcgacgatttaaacccaatgtcatgaggataaggagcaaaaagggaaaaggagcggaggaggaggaactgagcgggaaagagaaaatatgggacagcgaaaatgaaacgtaagcaactatgaaggtgcggattacgatcggagatataagaccaagagtgggaggaggaaagggaaggaatggaaagagaagcagggagaagggaaaagaccgagaaacggccaagaacgtctgctgcattgttagggaagcgggacagaatctaagatccggaagaaggacaaaaaggagaaatagaggggaacacaaaaggaagagaaagcagaaaagcggaaaaacgaatcgcaaaaaagagagaggggatcatctgcgcttacttgaggggacaaaaaaaggagtggaagatagagggaaggaagaaacacgcgagcggaggatggagacggaagagggaagaaaaaaggagaagagataagagaaaagaaaccacagaagaaaggagaagaagggcaagggcaaaggagaacgggaaaacgattcatcgcgtgaactaaaacacagacaatgaagggagggggaaaagcataaaaaacaaactaagagatggtaaacgataccgaacatcgatcaagcccgagaaaaaagaaaacaaaagaaattgagtagcttcatctgccataaaaaacagcatgctgcgatgttaaacgatgaaatgttacaaggtgagaaaatgaagaaggtgactcacggatatttacgaaaattaccccacaactataatcgtcgaatgaggcacggagaaaaatgggaggagcagaagtgaaagagaaagagaagatggtgaatccacacacgggatctaaagccggtgttgagaagaaaaacataccctatagagacggatgtttaccgcttgtccataaaacgctttcattactaatgaacggaggaagtgctcattagtaataggagaagatcaaaagtggtacgttcacgcccaaactactcccgaaagagtgaaataggacgtgggatcaatgccatattcagtgcagcagtgggggaatatagggtatcaccccatcagcgtatctagtgggatacactaactaaaacagttggcccctctccaaaagtacaacgcggcttaacctaggcttgatgaggctacaacgaggcagtcagccgcaaggaactctgtacgcgtatcaaagaagtgactcacctatcagaccctaggggactggaataatcaatcgtcgaaaccaccacgagcagagagtggtcatgaaggtacggtcttttgtattgtttgcctcatgtgttgattactatgcttagaatttttttaattatcctacatttttatcaaacatttactatatgccgaaactacgatttttatcaaatcactaatttagttggaagaggcaatgcatgcccgcgtctttcaaggccaaattatgtatcctacaggctaatagtcttaatcatgggataaacagtagtccttttaattcctccctagagaaagaccttccgaataacccaagtaatatcaggaggccgttattaagtatcgggaataacgataagtgtaaccaagctattttttatatttatttagggtagaatggttccgcttgattactaaaaggaatgtttatgctaacaattacagatgtgtcaatgttatactctaacctcaagaaataattggatagcgtcattatcaattataaatttttaaaatggcattaaagataaaaatgctttagggagatagtttcacaattcgtttgttattcaatttacacatataatttattgcatttcctggtagtgatgatagttttttgttgattaggtgttttattttggtggctatgatatgatgaaaaaaaaaaaaaaaaaaaaaaaaaaaaaagaattc

SEQ ID NO: 45 - DNA, 947 bp, synthetic construct
  misc_feature 1..947: note = Artificial DNA standard
  source 1..947: mol_type = other DNA
gatttaggtgacactatagaagacgtaagggctatagacttcgacgattcggacagctccgtgtgtgagcaaggtagaatagagagggtatagtgtaaaaaggctaaatgtggagctagagactcgaaaggggccggttaatgtggcaatcagtggcagttaatagcccacggaaaggtcgctaaccgggttcggtaacgattccgagacgcccggggtgcgcggagcagcgtccgtccgtggacccatccgcgcattcgaggattacaggtccggcgcctaaatggtgcgaagtcccgctctttcggggtgctgatcgcgccttgatacctctccacgctcgccaccgagcgaaaggaactcacgtgaccgtgttgcgagtcgcaaccgcgaccaggccaaacgctagcgattatcggttgcgatccaccgacccgtaagcggggggttcgacgcggtccccggccaatgccgtgcaccgcccatgtattcgtggagcgctgttggatgccggggggtcaatgggcccagcgctacccgtagtgttgtggtccgcaggcaccaacttcacgtaagaacccttaattgtcctttggcccgtcccaggccagcgcagcgccgtgactttcaatgtgtggacccgttttcacccgggtaccgtttcccagacgccccgcaattacggcgtccatatcggatgggtctatctagtgtgttccgcgccgagcacggggcggcaagtccggaccgtcgcggatgacgcgattgtgggcaactacggctagcgtgaggtggacctaagtgacccgcgcgcaaagaagggttaggctaagtcaactccgcgctccccgcactcgttattggcagcgcgtcttcaattacgggccgggggagtaattgtatatgcatacaaaaaaaaaaaaaaaaaaaaaaaaaaaaaagaattc

SEQ ID NO: 46 - DNA, 1709 bp, synthetic construct
  misc_feature 1..1709: note = Artificial DNA standard
  source 1..1709: mol_type = other DNA
gatttaggtgacactatagaaggcaggtctgcacggatacggcggggacgtaggggtatacgcggccttggccccgccaaggccttcgtccattccgcggccccctggcgtgttgcccgaggctccccagctagcacaccgggggtcgcccttgccgaggctaggtgtgcaccagagctgtgattcgtgagtgcgatgccgccggggcggacttgcgtcagcggattcacacatctcgccgttgcgggtcggaaccacgttcgaatagcagggaactggccttgggacacatggacattcgccagaccgactgggttgcgtgttagtgcggtccctggccggaaaggtttggggacacacagtgggcgctctaagtttgcagctcgctgtgaggagcatcgtggcctccgtgcaacgggagatgacagcatcggggccgtggcagttaatagcccacggaaaggtcgctaaccgggttcggtaacgattccgagacgcccggggtgcgcggagcagcgtccgtccgtggacccatccgcgcattcgaggattacaggtccggcgcctaaatggtgcgaagtcccgctctttcggggtgctgatcgcgccttgatacctctccacgctcgccaccgagcgaaaggaactcacgtgaccgtgttgcgagtcgcaaccgcgaccaggccaaacgctagcgattatcggttgcgatccaccgacccgtaagcggggggttcgacgcggtccccggccaatgccgtgcaccgcccatgtattcgtggagcgctgttggatgccggggggtcaatgggcccagcgctacccgtagtgttgtggtccgcaggcaccaacttcacgtaagaacccttaattgtcctttggcccgtcccaggccagcgcagcgccgtgactttcaatgtgtggacccgttttcacccgggtaccgtttcccagacgccccgcaattacggcgtccatatcggatgggtctatctagtgtgttccgcgccgagcacggggcggcaagtccggaccgtcgcggatgacgcgattgtgggcaactacggctagcgtgagtaggtggagcttgaaaaattacggcgcgtgtcgacctcctgcggcgatccgacttcatgacacgcgcctctgaacgctccgtttggggcgctctacaagcgggtaaactacagtgatggtggaaccctgactggacaggtccgggcaatccgctcgcgaaccagtggtggtaaggtcaggggacgtcgggctaccgtgggggtcacacggcccagctctgatgcgggaccgccagggatgggaatgtggaggaccaggccccagcggggggtcggtatcagctggttagaacgcggtcggcggtggatgtttagggattttgtacgcggagggccgcgttctaggagcatcggggggtccaggggccaacgcctgaccactcctggtagcgtgcttcggccgagggacgacgcagtcccaacacgtgcagctcttgaacttccactagtccctaacaacgcccgtctttgccgagggtggacctaagtgacccgcgcgcaaagaagggttaggctaagtcaactccgcgctccccgcactcgttattggcagcgcgtcttcaattacgggccgggggagtaattgtatatgcatacaaaaaaaaaaaaaaaaaaaaaaaaaaaaaagaattc

SEQ ID NO: 47 - DNA, 1458 bp, synthetic construct
  misc_feature 1..1458: note = Artificial DNA standard
  source 1..1458: mol_type = other DNA
gatttaggtgacactatagaagaccgcgccttctctgccccgtgcgggggctctggtgctggccccgggcccacgtccaggggcctggcggtctggctccgtcaggctgacccttgtctcttgtcgcgctgcacgcggtctcgcccggcgcggttgtcagcggcggccgctgcatcctgaactcccgcggtttcgggaccgtccaaagggctcggtacgcatcctggccttcgttttgtgagtaagaaatctcgttccactgggtactgctcctcgtcttccctctcctaactacggcgagaaatcctcaccactaccatactcacgactttgatggcgtccgagcccctaaacgttcactcgcatgacgtgctagtcccgatggtttaggagacaaatgggctcgcctccgccccgcacgacctaggtaagcgatatggagcctcggggtggctgcaaaggtaccatcgactcacgaagcgatgacgccaggacatgatcaccgacaatcgggtactacggctggagaggttattgtcatctaattctagtttggtcttgaaccgaagatcccttatggcctctttcgacggaaccaataagactacgaggtaaccacacattgatgctcgtaagttgtccccccaggcggctgcgcctgctaggtcacccaaccctggtaccaaccacaggacgaaagaatggattcgctaaaatggagcggaggtgtgggcaaaagcgcacgagcgtgtcctctcaactgtccacctccacttgtggagttgcctggccggggtttctacattctagaccaggccggtctagaacgatatggcaaggcgccggagctgtcgtcgcgcatattccgcctctactggaaggccagcgccggacgcgcccctgaaatccacgcttgatcgtaggcatgccgccaggtacaaggctctttgtgcggcaagagtcctcggtggcactggagggtgtctttggatagcacgctgtcccgggagttcctatggatatcggagccgccagataactcaaattgcgagaagattggggctggatcgttgccccgtgagcggggtaaccttcccgactggcccaccaaggaaccatttgttttgcgcttgacacatcccgacttcttgcgcatttcggccgtgagggggcaccagggtgcctatttacctggggcttccgccagcctagcgtcccggagtagtacctgagctgttcgcgtgagctaactacccccgatggtcagcgaacgacatgttcggcgggaggtcctagctctgcgcccgagacgacggtcgcgagtgcgtcagtcggtctatacactctcactccaccgggagcaaatgaggggtgacaaagtcaaaggccgagccccatggagcgcataatatctagcgcgccaaaaaaaaaaaaaaaaaaaaaaaaaaaaaagaattc

SEQ ID NO: 48 - DNA, 1040 bp, synthetic construct
  misc_feature 1..1040: note = Artificial DNA standard
  source 1..1040: mol_type = other DNA
gatttaggtgacactatagaagaccgcgccttctctgccccgtgcgggggctctggtgctggccccgggcccacgtccaggggcctggcggtctggctccgtcaggctgacccttgtctcttgtcgcgctgcacgcggtctcgcccggcgcggttgtcagcggcggccgctgcatcctgaactcccgcggtttctaaccacacattgatgctcgtaagttgtccccccaggcggctgcgcctgctaggtcacccaaccctggtaccaaccacaggacgaaagaatggattcgctaaaatggagcggaggtgtgggcaaaagcgcacgagcgtgtcctctcaactgtccacctccacttgtggagttgcctggccggggtttctacattctagaccaggccggtctagaacgatatggcaaggcgccggagctgtcgtcgcgcatattccgcctctactggaaggccagcgccggacgcgcccctgaaatccacgcttgatcgtaggcatgccgccaggtacaaggctctttgtgcggcaagagtcctcggtggcactggagggtgtctttggatagcacgctgtcccgggagttcctatggatatcggagccgccagataactcaaattgcgagaagattggggctggatcgttgccccgtgagcggggtaaccttcccgactggcccaccaaggaaccatttgttttgcgcttgacacatcccgacttcttgcgcatttcggccgtgagggggcaccagggtgcctatttacctggggcttccgccagcctagcgtcccggagtagtacctgagctgttcgcgtgagctaactacccccgatggtcagcgaacgacatgttcggcgggaggtcctagctctgcgcccgagacgacggtcgcgagtgcgtcagtcggtctatacactctcactccaccgggagcaaatgaggggtgacaaagtcaaaggccgagccccatggagcgcataatatctagcgcgccaaaaaaaaaaaaaaaaaaaaaaaaaaaaaagaattc

SEQ ID NO: 49 - DNA, 1706 bp, synthetic construct
  misc_feature 1..1706: note = Artificial DNA standard
  source 1..1706: mol_type = other DNA
gatttaggtgacactatagaagacggtctgctgccgcccccgggctaggcccggggagggagtgcgggtgggaaccctccttggcggggaggggcgcgtagcccaggtgctcagacctggccgtcactatcgtgctccatggtcccagcgccttagtaacgcgtagggacatatgcaggctcttccgggcagcgccctgcgtccgcgccgtcccccctgggtccagccgcggccccgcccacccccgcccagtgacgtccgcacgcaccgggcgagcaaggccagcagcggcccgcggcacccccagtggcgagcctgacccgctgcctgggggaaggctgaacgtgggccggccctcggccgggtcgacagctcctcgcacttagggctggaaactgtgtcgcaagctgttccctgcactgactggccgcggtggggttctcgcccggggcgtttgccgtcaaggtgttcccgggtggggggaggcgccaccggagtactggggggtctcgtgtgcgccggcaacaccccctcgaccccgcgtttggttcgtgcccgccctggtctggcggagacggaggtcctctcgccgggggggagggacgcccgcccagagagctgctgtgtagggaggtaccggaattggcgagtaacttgctgaagcgtccgccggtatccgtcgctagtgtgtaaaatatgttgacatcccgcagtatgcgatatcaactaagtcgcatcgagttgccccttaggccgcaccttacttttaagaaaagtacgatgtgattcttccactcatctgcaacgccacagcgtcctacatcacgatgggaaggtttttcattagcgttttagtgggatataggctaactaatgaatgctaggtgaggcaagagagggttcggagctaaaacgttcggggctacgctgacctaccgtatgttcccaccgtctgaacgtgtttgcgtttagataccagtacgaaagtttggatcaattgggagaatttagtggtgtagttaagtgagcattttctatagaccgacttgatcccttagaaaatatggtaagactatgggggatcagtgatatctacgtagcagagttctagtatgagacgccgagcaagggcgagctctgggtcttggcaaagctgattcacgataaagcgatagacgaagtaatcgtatcaacgatgctacattacactacttcacgatcgccggtcaacatgtagaaagggtcggtattgacagtcgtcgtctacggttatagaagtttccatttattatatgggactatatatatgtaagattctagcagcgagtagatttaacttaaagttcatgttaaaaaccaggtaagtaatcgtcttaatttactatatttcatattaggtaattcaatacttccgtaaagctattcttgtgtaacttcaaacaagaaactatgcaaatacacgtaaacatagaaggagccgatcatctgtttattccaaagctgtggttctgctaagtagaaatagcttccacactagtccttctgccgattacccctaccggcgtagatggatttatttaatctttacgatatcgtttgaaagtttttcttttagtaaagattaggtaaattaagcgaatgatagtaatattcatatataagtagttacaaaaaaaaaaaaaaaaaaaaaaaaaaaaaaagaattc

SEQ ID NO: 50 - DNA, 1003 bp, synthetic construct
  misc_feature 1..1003: note = Artificial DNA standard
  source 1..1003: mol_type = other DNA
gatttaggtgacactatagaagacggtctgctgccgcccccgggctaggcccggggagggagtgcgggtgggaaccctccttggcggggaggggcgcgtagcccaggtgctcagacctggccgtcactatcgtgctccatggtcccagcgccttagtaacgccgcaccttacttttaagaaaagtacgatgtgattcttccactcatctgcaacgccacagcgtcctacatcacgatgggaaggtttttcattagcgttttagtgggatataggctaactaatgaatgctaggtgaggcaagagagggttcggagctaaaacgttcggggctacgctgacctaccgtatgttcccaccgtctgaacgtgtttgcgtttagataccagtacgaaagtttggatcaattgggagaagctgattcacgataaagcgatagacgaagtaatcgtatcaacgatgctacattacactacttcacgatcgccggtcaacatgtagaaagggtcggtattgacagtcgtcgtctacggttatagaagtttccatttattatatgggactatatatatgtaagattctagcagcgagtagatttaacttaaagttcatgttaaaaaccaggtaagtaatcgtcttaatttactatatttcatattaggtaattcaatacttccgtaaagctattcttgtgtaacttcaaacaagaaactatgcaaatacacgtaaacatagaaggagccgatcatctgtttattccaaagctgtggttctgctaagtagaaatagcttccacactagtccttctgccgattacccctaccggcgtagatggatttatttaatctttacgatatcgtttgaaagtttttcttttagtaaagattaggtaaattaagcgaatgatagtaatattcatatataagtagttacagtttctcaataacttttttgttggcgatttgtttaaaaaaaaaaaaaaaaaaaaaaaaaaaaaaagaattc

SEQ ID NO: 51 - DNA, 663 bp, synthetic construct
  misc_feature 1..663: note = Artificial DNA standard
  source 1..663: mol_type = other DNA
gatttaggtgacactatagaagaggcagtgggagtcccgccagggaggcaggtgaccaatgctcttccgagctcctgggaccaaccactgagacgtcgttgcgctcaccggacccgatgctacaaacccgaggtgcagcgttgacagctcgtggatagccgggctggagttgcgtgtgagtgtaagaggtacccgattgcgagagcggatcacaccctaccgttgcccgatggaacgctggcgcggtctaccgctcgctgaacggctccgtgaacggtacttccgtccccttaatgtatgggcccacgctgtcttagagcgcgctaaggtgatttgtcgaggtggaggagacgggcgactgcgggaagagaagtccctgagccatgtaccttgcggtgaggaaggcgcgagggggacgggcggttcttccgtactgtggaggggccgcgcccaataatggtcgtgtctgaatgtttactgcgcctccgtaacgcggccgcctcttgacaccgcggctccctacccgcctcgggcgagtgagcaggtttcagagagagtctaacaagagggttctcttatctcgccgcagctcgtacaacatccccaggtaactatgtgcatcattctaaaaaaaaaaaaaaaaaaaaaaaaaaaaaagaattc

SEQ ID NO: 52 - DNA, 1012 bp, synthetic construct
  misc_feature 1..1012: note = Artificial DNA standard
  source 1..1012: mol_type = other DNA
gatttaggtgacactatagaagaggcagtgggagtcccgccagggaggcaggtgaccaatgctcttccgagctcctgggaccaaccactgagacgtcgttgcgctcaccggacccgatgctacaaacccgaggtgcagcgttgacagctcgtggatagccgggctggagttgcgtgtgagtgtaagaggtacccgattgcgagagcggatcacaccctaccgttgcccgatggaacgctggcgcggtctaccgctcgctgaacggctccgtgaacggtacttccgtccccgttgctgccgtactctcgggactttgggtgcttgcggcggcgggcgggttatacgagctttcctttcccctgtcgttcgcttagaggcttcaggcctccccctttctcggctcgctcgacttctacgctttttcgcctgctcgacggagaactggagagatgtaaaatagggggaagataagcgaaagtctctaccaaacgttctatactccaggtttcgatatatcgcacacttttaacggatacctgtctgccgtaccgccttgggggcgcgaccctctattctcaggctccgaccatgcgtgcccttgctctcgcctctaggctcggtcgttggctcggagtcaagttaatgtatgggcccacgctgtcttagagcgcgctaaggtgatttgtcgaggtggaggagacgggcgactgcgggaagagaagtccctgagccatgtaccttgcggtgaggaaggcgcgagggggacgggcggttcttccgtactgtggaggggccgcgcccaataatggtcgtgtctgaatgtttactgcgcctccgtaacgcggccgcctcttgacaccgcggctccctacccgcctcgggcgagtgagcaggtttcagagagagtctaacaagagggttctcttatctcgccgcagctcgtacaacatccccaggtaactatgtgcatcattctaaaaaaaaaaaaaaaaaaaaaaaaaaaaaagaattc

SEQ ID NO: 53 - DNA, 1695 bp, synthetic construct
  misc_feature 1..1695: note = Artificial DNA standard
  source 1..1695: mol_type = other DNA
gatttaggtgacactatagaagaagggggaagggggactggcgcgcggcaaaccggggcggcgacgaggccattgacgctcatttccttccttttgcctcggcgccccacccaacccatacaccccccctcagcgaccgcggcttccgttcttgcaaaggcctattccaggaggtacccataccacagccagtccagcacaacgaaacggagagaccaaagggatgaggaaaagtgagataaattcagtcgacggttattgaaagagaaaatcgaacgacagatccacatgatggctaacacttatccaactcagaaagtgagtgtaaagagggcaacggcgaagggttagaatgaacaacatgccagaaagattaagaatgcgtagaacttgaatcgagcgtatctaaagtagaatacttcgaaactagcgacttaggtgtttgagtacgcgagtctacaatagaagcagcatgcgttcctgttggtaagggagctggatgctgattctgatgactttcgactccccgggtcgagttgtttaagggaactcgagtacccagataaggccagaatgtttaactctgaagctctcgtctgctaaatagcaattgcgtcgcacagtttcgcaaataacatataaatcgacggctggatctcgtagcaccaaggtgcgatatcatcaatgctaaccttaattagctaagaaagaagtgcaacaatctcagagctttctttttagacacccgaacccgaacgtttgtttaccctcagcctcgtgccaggcctgctcatcaatactcctagattcagacaggaatacaacggtggaccgaatatcggttaggcttgtctgattgtttctttagaccactaatggtaagagtccaaaaatataaaaataatttcctgttcggagtgaaaagtaaatagagaaagctatggaatgaagaattgagtgaaacagtcgaaactgagaaggaacgggatgaagaagagtgagcaatgatgaagcaactggggacaacgaggaatggtttagtacatctgccccctcgtgaagccgggacgtcacaggagaagatgttcgtgcataagaaggaatattacaatataatggtaggcgggctagaagtaataacaaattgtggctaaacctcgggctaaccggaacttcctacgtaaaaggaaaagtgaacaaggaaaaattaatgcaaataaattacggacttggcgcagtaaaaaaacaggatatcaatccaaagaaatcgaacctgtcgatcgaccagagggatttgtgccataagaaatagtagcgagaaaaagtacaacggagaaagagaaaggcaaactaccgcagtgaccgcgaagcagactaaggcggggattaactagctctgaagatcaccatgggctatagcctcagaaatcgggaaacggggaagaaaagaagaattagcaagactacccccagaccagaccggtaattcggcttcgtggctttgaccgcgacatcggtacaggaaggccagggggggtgatgggtgggggggagcgtgcacgagcggaaggaaatatcttattagccactaacggttggttattgctatgcccctttccgagaaatgttcgcgaagttgagtagcttagctggtccagtaaaaaaaaaaaaaaaaaaaaaaaaaaaaaagaattc

SEQ ID NO: 54 - DNA, 785 bp, synthetic construct
  misc_feature 1..785: note = Artificial DNA standard
  source 1..785: mol_type = other DNA
gatttaggtgacactatagaagacatacaccaggatcctaacgtgcttttttctaagagaaggaggtagggagcacccgattagaggccttgaccgccagtcactctaactttcacaactgtcaacgtcctaacattgagacaataccggacttcaggctaattaatgaggttcggtcatcaggggtagataggatgctacgtaaaaggaaaagtgaacaaggaaaaattaatgcaaataaattacggacttggcgcagtaaaaaaacaggatatcaatccaaagaaatcgaacctgtcgatcgaccagagggatttgtgccataagaaatagtagcgagaaaaagtacaacggagaaagagaaaggcaaactaccgcagtgaccgcgaagcagactaaggcggggattaactagctctgaagatcaccatgggctatagcctgcaatgttgattaaaggttagaacacagaaagggaatcgatccaaaacgattccatcaaaagaaagagtcagaaatcgggaaacggggaagaaaagaagaattagcaagactacccccagaccagaccggtaattcggcttcgtggctttgaccgcgacatcggtacaggaaggccagggggggtgatgggtgggggggagcgtgcacgagcggaaggaaatatcttattagccactaacggttggttattgctatgcccctttccgagaaatgttcgcgaagttgagtagcttagctggtccagtaaaaaaaaaaaaaaaaaaaaaaaaaaaaaagaattc

SEQ ID NO: 55 - DNA, 1783 bp, synthetic construct
  misc_feature 1..1783: note = Artificial DNA standard
  source 1..1783: mol_type = other DNA
gatttaggtgacactatagaagaagtctacgaccgggcccggtccgtcccagggctgcggcttgcccgctgcccccgggtcgcctgggccccctggtctcccggcaccgcgccttcggccggtcccgccctgccccggcgcccccccattgccgttgtcgcccctctgcgcatcataaagatatcgtttgaccgaattgagatatgttgggtgctcgctaaatttgcgtcgagttcccttttcctgtgagttccgccaacttagtgttgtgtgctttttcgactataacctgctgagatgcggtataagagcgggtataagggacgtttgctttccggtccttcgaactttaggacacattcgcacgatatgtacaccacggcacaagaataggtggtcgatctatccttgtgcgtcagtgacccttcatcccttgatgtcgcgcagacccgcccagggtcctctgaaccaacctgttcatcactcctttgctacggcggaaaaaggtttggtgtgcgcttgtcgacctcggttgaagcactaagcggtatacgcactacgtctaactaaaatccgtcacggccacgaagattggcgccgactcgacctatctcgtccgccggtccccacgcctgtgtccatcgggacaagttgggatacggcgtccttgagcatcgttaaataatcgcagtacgtagctgattggggaaaagtacgttaacctaccaggggagcgggatgtagatccgtagaatgccgtcccaagcagcaacagcggcgacggtatcccgaccacgcggccaccgcagggacgtgatctccttcacgctttgtctgctgacctgatgctcattataggggaagggcgatatcctatatcatatggtaaggggaagatttaagggcctggacggttctctggcgcggccaattatcgcaccccagactagagaggcatcgtcatcatactctaccaattcctcgtcctggctccactcgaccagatcagaggcctcggttcacatccgctcgggatggcggcgccacttgcatctcgacgtaacctgaaatcctcaggatccgggacttggcgggttgaccaaggggctcgatgattgagacagggtactgcaccacgaccagccaaccctcacgaactgtccatgctgcgtatgaacgctagcgaaacaccaaaccagctcgtcatggctcaacgattgaagtagaggagtgcaattcgagtcgtggcgatgcccaatctcaattatgctggcggaggggacactcacgtcccgaggaagagccatccgcggcaaagcgccgaccagctccacaaccgaagccgcgacgacgtgccagtaaatagcacgtcgaggagcacgcagcatggggaaggccagggtgagctcagcgtccgccgcaatggcttcggtgaggtagacccgacacaccatccaccattggcctaagccgatggggaccttcgacgtagcgatcgcgccgtacctggagctcgctctctggcaggagacgtgccgaggggtaactggcgctgagcgaacccctcaatcatagcaagtgtcccagttttttgatgttgagctttttggagtagttgggggatggagggaatatgtatagttataatgttttgatgatggaactgtatggagatgtagtgaatgcaccgccgtgaagatccggctcgagaagcccctttcgacgggtcttactgacgcgcgggtgtaaaaaaaaaaaaaaaaaaaaaaaaaaaaaagaattc

SEQ ID NO: 56 - DNA, 1235 bp, synthetic construct
  misc_feature 1..1235: note = Artificial DNA standard
  source 1..1235: mol_type = other DNA
gatttaggtgacactatagaagaagtctacgaccgggcccggtccgtcccagggctgcggcttgcccgctgcccccgggtcgcctgggccccctggtctcccggcaccgcgccttcggccggtcccgccctgccccggcgcccccccattgccgttgtcgcccctctgcgcatcataaagatatcgtttgaccgaattgagatatgttgggtgctcgctaaatttgcgtcgagttcccttttcctgtgagttccgccaacttagtgttgtgtgctttttcgactataacctgctgagatgcggtataagagcgggtagtccatgcaccattaacccaatccttgcagggtatcgtggcacagttgactcgcctttttgtatatgaacgcctcgggaagtaccacctgatctaagggacgtttgctttccggtccttcgaactttaggacacattcgcacgatatgtacaccacggcacaagaataggtggtcgatctatccttgtgcgtcagtgacccttcatcccttgatgtcgcgcagacccgcccagggtcctctgaaccaacctgttcatcactcctttgctacggcggaaaaaggtttggtgtgcgcttgtcgacctcggttgaagcactaagcggaccaaaccagctcgtcatggctcaacgattgaagtagaggagtgcaattcgagtcgtggcgatgcccaatctcaattatgctggcggaggggacactcacgtcccgaggaagagccatccgcggcaaagcgccgaccagctccacaaccgaagccgcgacgacgtgccagtaaatagcacgtcgaggagcacgcagcatggggaaggccagggtgagctcagcgtccgccgcaatggcttcggtgaggtagacccgacacaccatccaccattggcctaagccgatggggaccttcgacgtagcgatcgcgccgtacctggagctcgctctctggcaggagacgtgccgaggggtaactggcgctgagcgaacccctcaatcatagcaagtgtcccagttttttgatgttgagctttttggagtagttgggggatggagggaatatgtatagttataatgttttgatgatggaactgtatggagatgtagtgaatgcaccgccgtgaagatccggctcgagaagcccctttcgacgggtcttactgacgcgcgggtgtaaaaaaaaaaaaaaaaaaaaaaaaaaaaaagaattc

SEQ ID NO: 57 - DNA, 777 bp, synthetic construct
  misc_feature 1..777: note = Artificial DNA standard
  source 1..777: mol_type = other DNA
gatttaggtgacactatagaagggaaatattttgcgtctcacacgatcgcgagggagttacgggtaacacctagcgggcccgtcgtccgacgccaggcgcccaggccatcggcccccaccgcaaaggctgttaatctgcacgtatacccgactggcgcagttttgagacctggaccttgatccttttatctctgtcctgcttcttgttcttgtcggggccgttttagtcacgcttttggttatacacggccatacttatcttgcgcgctagcagacatattgaagaagcatgtgtcgctgtgatcggtgtaagcgcggataaagccgtgcgatcttccagcaggtgaaggtcgaggaagcaggacgcgcccaggagctgtcgattgcatcgggcgttattttcaaggggagttcggtgcaggaaactgggatcggcaggtgagaggtacaagagttggaggaccgtacggtctccccagcctacggtccgtcacacgattacaccttctcgcgacgcgtggacccatgaatataccctcacccctcgtgaaccactattctggggcaaacgaccgcccgggagcaggcgttcatcggacgggctcaccgctgggagcaaaggtcgttacggaagaatatggatgtagggtaccaatactaagggtaggactggcggggcgtgtgggggcgaacgtactaagaaagttgtaaccctcgaggcggcctccactcaaatcgaccaaaaaaaaaaaaaaaaaaaaaaaaaaaaaagaattc

SEQ ID NO: 58 - DNA, 488 bp, synthetic construct
  misc_feature 1..488: note = Artificial DNA standard
  source 1..488: mol_type = other DNA
gatttaggtgacactatagaaggcgcccaggccatcggcccccaccgcaaaggctgttaatctgcacgtatacccgactggcgcagttttgagacctggaccttgatccttttatctctgtcctgcttcttgttcttgtcggggccgttttagtcacgcttttggttatacacggccatacttatcttgcgtgagtatacatcaactgaaagttgttaccataataagatagatccaaccaggaaccttctcgaatagtcgcgcgggcgtcgaaattgcactctacggtagtgccgtcgtcgcaaatgtcatccccgttcgatactactgtgtctggatagctggtgcttggactctgtgttttagtttgactagtgactagccactaacggataggagagtctggcatttcagttctctttcatgggttatgagagataaggattgatatcaaaaaaaaaaaaaaaaaaaaaaaaaaaaaagaattc

SEQ ID NO: 59 - DNA, 1548 bp, synthetic construct
  misc_feature 1..1548: note = Artificial DNA standard
  source 1..1548: mol_type = other DNA
gatttaggtgacactatagaagaggggcgggggatgggcgtcaagtgttggccccgcagggggttgcccccacgggggggcccccacgaacagaggggtgacggggccggaactccggccgccactaaggcgcgggcctccggccagtggaatcttggttaactattgtacttgccgcggtgagagggtctgagagggattcgatgctaggataaaaatgatcaaaatgaagtgactgaaatgtacctctgtgcggatgggatcctaagccagtcggttaagcttagaccattggtgctaattctaaatggatgaattaaaataacgagaaaactgtagagttcatgccaccccctggtcatgcaaaatgtggtgtacacttccgagtgcaggggcgattcctcaaccaacgtagctttggagtcctcatgtgccgctgtggagacacgggattctcagttcgctttggctccgtccaagatttgcgtggctgtgtcacagttcgattgacagatgtcggacgtcaacggaagttgtaaagaaacaatcaaattgtaagtctgcgcaccttaaatgtaatggttctatgtcgctggtaactccttttttgtgatgtgaccgcggattaattgtccgcgtattttacgcttttgatcgtgggtacgggtatagtgcagtgagagcatgcgaacggatcatgtcaatatacaggatagccaattggaaggggtcgatctgcgaacgatgacataggagaaacaatctgagactgccatattaaacggcaatgccccggattctaattgtacgtgttatcttttcctatctgggtccagtacccgcgcatcgatagtcagaatgaaaattacggttccacatccggtctgtcactttgtcctagtggaatggcgaatcttgttgcgacctgccacagtagcctccatggcgaccccccgttcactgtgaatggtcgagacctactcatcctttacatcgaacaacctctgcggtatgatgatacctgccacattatttgtgaaagtcagtttgcacgtaggcctgagaagacgtattaggacggcctacacaagcaattcatattgagcaaggaaaggagtggaagacctgaggagaaagaaagtcaaagaaaaacaaggaaaaataaatttgattgtattcagagtaatgccctgccaaggtccatatcgatccaaaggcgctacaatagaaaaagaaacgcaagtcacttcacatttatatcttgcgatcacgcggttttaatcttaatcagagcttacgagcttctttccctctatcttttgtagtattctaaatatcatttagtatcgaatgtctctgttacgtctttaacgtttttgtacaatccaaacgacattcgctacgggcttggcggtcggcgcatagctatagcagcgtgttaggcgcggttagctcgacctgcagggacgcttgacaaggactcgggagggaagaggaccattcctaaatctaaaaaaaaaaaaaaaaaaaaaaaaaaaaaaagaattc

SEQ ID NO: 60 - DNA, 1420 bp, synthetic construct
  misc_feature 1..1420: note = Artificial DNA standard
  source 1..1420: mol_type = other DNA
gatttaggtgacactatagaagccgccggagggctggggaaggcgcccggtggccagaggggcgggggatgggcgtcaagtgttggccccgcagggggttgcccccacgggggggcccccacgaacagaggggtgacggggccggaactccggccgccactaaggcgcgggcctccggccagtggaatcttggttaactattgtacttgccgcggtgagagggtctgagagggattcgatgctaggataaaaatgatcaaaatgaagtgactgaaatgtacctctgtgcggatgggatcctaagccagtcggttaagcttagaccattggtgctaattctaaatggatgaattaaaataacgagaaaactgtagagttcatgccaccccctggtcatgcaaaatgtggtgtacacttccgagtgcaggggcgattcctcaaccaacgtagctttggagtcctcatgtgccgctgtggagacacgggattctcagttcgctttggctccgtccaagatttgcgtggctgtgtcacagttcgattgacagatgtcggacgtcaacggaagttgtaaagaaacaatcaaattgtaagtctgcgcaccttaaatgtaatggttctatgtcgctggtaactccttttttgtgatgtgaccgcggattaattgtccgcgtattttacgcttttgatcgtgggtacgggtatagtgcagtgagagcatgcgaacggatcatgtcaatatacaggatagccaattggaaggggtcgatctgcgaacgatgacataggatacccgcgcatcgatagtcagaatgaaaattacggttccacatcgcttccgtaacggagtccgcaatatcgccctgcgcaccgggtcaccaattgaaaagaacgctcggatataggcgtttgcatcgtaaacgaaaatacaggaagacaacgatgccgaaaaaacacacctgatcttggcgctgaaagagcgccgcttagactgtattcgggtatatgcgttatgcgagtgtaacaaaccgctacaacgccaccattaacttggtggaaattagcgggaacagtcgaggaaggaagcaaggagagaagcaccacgcccacaaacgaaggcaccccacatgattaagcccgtactctcggccgcgcaacctagggcctctcaagattcagtaccacggaatgttatctatcatactcactaaaatttttacgaagtgagcggtaaaggagtgggaataagaccgatgagcgtgtgtcttagtgggtcatggcttgagtggtctcaggacctagtcggtgtgaggcgggagctgcgcatcccatagtgagggatcattttggctcccttattaatttaatacacctagcgctttcaaaaaaaaaaaaaaaaaaaaaaaaaaaaaaagaattc

SEQ ID NO: 61 - DNA, 1812 bp, synthetic construct
  misc_feature 1..1812: note = Artificial DNA standard
  source 1..1812: mol_type = other DNA
gatttaggtgacactatagaagcacctctgcgcaaaggcgcgggtactgaaaaacatagggtctcatatatcttgtagttgttcgtgtatgatattattatgattttttatacacatcttctagatttttgtaacagagatccatgagagaaatatactaggtccacataattctgagcgagactacatgggcatccgacgagccacaatagagacatcaggctcgctgggctcccccgtccgccacccttcaacgaggaccggacttgctggatcgcacccctccttgtatttcccgccgtagtaagcccgatgttccatggcctcaagctcttccatcgtggcccccgccttccactaggagagaagccgattcaagaacccgacgaggtcgtgtgcctgacgacgaacacattcgagattgccccacgggcaatgtacttcatcccggtgtcccccggtgataggagccggtgcacaatcctcgacgcgtacacgccatcgggcccccggccggagagcagacagggacgtggaggggtgccggtgacgtgggacacacgcatgaaaaggaacagttatagaggtgtgctacttaactacccgacaaactccggcgagcgcaccgttccgcctgcaatgcccggtactaacagggccgggcactgctacaccaggcgggtccgcttccccagagccttagaagcagctcgggtctacgccgaagcattggtgcgggcaaatcctggtgcgccgccttttccgataagaggccggcttcaggccagtcgagattttgagagtaggtgagcagagatcgtcaaactgttgaagccaacacgattatgttgcgcactcgtcgtgctagcccccccgtcgtccttgccacgtcacaggtggcggtgcggcctacccgctaaagagcgcaagagccgacgcccagaagggggatgctacccggagcaccagtatgcggccgagcgcgctggagcaggccacgcgataaggatcacagctagcgccgaatcctccatctaaccatatggggatagtcgcgccgtagaaaactctgccagggcagagggattcgcctatatactgaatacccaccatgcctgtatgagcctacgaacagtcaacacaaaagcgcaagtcgtgccctacacaaactaaggcgtcggtgactcggatcataatggatgagttaaccagcggatatccttggggatgattatcagacgatcagggaatttacctacagaggactcgggatccctgggccactgtcatacgacccaaggttggcctcgacgtcgcgccctaagaagacccccaaggattagatcgatcgaccggatctttccacgatcctgttttacgcctctctgaacgccgtggcgtagcttgggcgacattcaggaactcagctaacggccacatgtccgtttagcaacctccctaagtgcccatggtatccaatgacgctgcgacccgtcattgggttcaacacacgcccagcaccattatagcggttacgtccagagcccccacagcggaacggagcctctaaatgctagaaaactcaactccctcctgtcgaggggccgggggcggcagcggggattctgcatcaggtcgcgcggagggacactggcgtgggccccgaagccgtcctgcgtttctctcactccgaacggacccgaccgctggttcggagtcggtcggtagtggccccggtgcactcgactggcggcgtggtgattggggctatcagtgaaaaaaaaaaaaaaaaaaaaaaaaaaaaaagaattc

SEQ ID NO: 62 - DNA, 1914 bp, synthetic construct
  misc_feature 1..1914: note = Artificial DNA standard
  source 1..1914: mol_type = other DNA
gatttaggtgacactatagaagcactcccggtccggcgggatccgcgccagacttgtcgggggtgcggctgcgcgcccctcacgcacctggggcgttctccatcccgagcccgctgctggcgttcgggccgttgcggccgcgcggtcctgcccgcccccaccctaccacaacgttatccccgctcaagcgcgcggggcgaatccgacgagccacaatagagacatcaggctcgctgggctcccccgtccgccacccttcaacgaggaccggacttgctggatcgcacccctccttgtatttcccgccgtagtaagcccgatgttccatggcctcaagctcttccatcgtggcccccgccttccactaggagagaagccgattcaagaacccgacgaggtcgtgtgcctgacgacgaacacattcgagattgccccacgggcaatgtacttcatcccggtgcagttatagaggtgtgctacttaactacccgacaaactccggcgagcgcaccgttccgcctgcaatgcccggtactaacagggccgggcactgctacaccaggcgggtccgcttccccagagccttagaagcagctcgggtctacgccgaagcattggtgcgggcaaatcctggtgcgccgccttttccgataagaggccggcttcaggccagtcgagattttgagagtaggtgagcagagatcgtcaaactgttgaaacaatcggtactgccaacttggggatgtgagtacgcatgactgtcacatcagcgagcatcaggcttcaaaggggaaaagaagccaacacgattatgttgcgcactcgtcgtgctagcccccccgtcgtccttgccacgtcacaggtggcggtgcggcctacccgctaaagagcgcaagagccgacgcccagaagggggatgctacccggagcaccagtatgcggccgagcgcgctggagcaggccacgcgataaggatcacagctagcgccgaatcctccatctaaccatatggggatagtcgcgccgtagaaaactctgccagggcagagggattcgcctatatactgaatacccaccatgcctgtatgagcctacgaacagtcaacacaaaagcgcaagtcgtgccctacacaaactaaggcgtcggtgactcggatcataatggatgagttaaccagcggatatccttggggatgattatcagacgatcagggaatttacctacagaggactcgggatccctgggccactgtcatacgacccaaggttggcctcgacgtcgcgccctaagaagacccccaaggattagatcgatcgaccggatctttccacgatcctgttttacgcctctctgaacgccgtggcgtagcttgggcgacattcaggaactcagctaacggccacatgtccgtttagcaacctccctaagtgcccatggtatccaatgacgctgcgacccgtcattgggttcaacacacgcccagcaccattatagcggttacgtccagagcccccacagcggaacggagcctctaaatgctagaaaactcaactccctcctgtcgaggggccgggggcggcagcggggattctgcatcaggtcgcgcggagggacactggcgtgggccccgaagccgtcctgcgtttctctcactccgaacggacccgaccgctggttcggagtcggtcggtagtggccccggtgcactcgactggcggcgtggtgattggggctatcagtggtccctacgggcggtgtttctccctcttctcgccccatgcagtgacaccactatctgctttctactgtgccagccccacgcccaccgagtacatgtggcgtttatagatttgacgagacggttgtcaattgataacaaaaaaaaaaaaaaaaaaaaaaaaaaaaaagaattc

SEQ ID NO: 63 - DNA, 1121 bp, synthetic construct
  misc_feature 1..1121: note = DNA standard
  source 1..1121: mol_type = other DNA
gctcttcttattataaataaatgcattttgtgacatatttatagtttaactggaggtcccttgcatctgaaaaattaaaatgatgcctacagacacgcatattcacagtctctagactaaatggggttagcgatatatgagcaagatctttggtatagttccgttcatttcctgatttacagccgttttacttttacatcgttgcctgaatttcaattctaaaagtatacataatatgttatgcgcgctctgttatctacgtttattgtttatcaaaatatcattgaatctatttaggaaggtggcccagcactactgcgcggtggcagacgcgccgagaggctaggtgggagtccgcggtcatctcaggtccgagtggagtaccacagatggcgtgcggccggaacgggctacgctctgtgtgcgactaagccacggttctatattcttcttacctactagcatcaatactcttagccgcagtttgtgagagcatgtcacttgcccgaaagcccaccaaactttataatcttcaaataacctaactaccctcattttataaagaaatatggcatgtagataaaaaatttccaaatgctagacaaaaataaatgttgataataaataataattgcgtaatgttccacaatgtcaagagggtcaaggccagtctcttcccctttcccgtttcgggtgtttgtggttggttgtgtgtggtgttggttgtttcccgcgttcggcttttctgtatttgacagtgcataccaagagatcattaaacgtttatccgaaatctatacactacagaagtaattaataaatcctctgacagaaaaagcccttttaacatatcctatctagtgcgaagttgggcgtggagtaaagcttgagtaactagctggtccgaacatgccaacgagtcgatggggtaacaggaaaaagggcgaataccataatcatggctacgccagagtacatgacttgacgatacaacaggatggaactaagtcacctaaatgggcacgaggaacatgcaagcagacgcagttgccgaaagttggcaaaagacgatagcaattcaagggttggtggacagcccacatggataaggttggaagagc

SEQ ID NO: 64 - DNA, 1147 bp, synthetic construct
  misc_feature 1..1147: note = DNA standard
  source 1..1147: mol_type = other DNA
gctcttcttattataaataaatgcattttgtgacatatttatagtttaactggaggtcccttgcatctgaaaaattaaaatgatgcctacagacacgcatattcacagtctctagactaaatggggttagcgatatatgagcaagatctttggtatagttccgttcatttcctgatttacagccgttttacttttacatcgttgcctgacgttaatttcaattctaaaagtatacataatatgttatgcgcgctctgttatctacgtttattgtttatcaaaatatcattgaatctatttaggaaggtggcccagcactactgcgcggtggcagacgcgccgagaggctaggtgggagtccgcggtcatctcaggtccgagtggagtaccacagatggcggggttatgcccgcggacgtagtcacgatccgtgcggccggaacgggctacgctctgtgttcgactaagccacggttctatattcttcttacctactagcatcaatactcttagccgcagtttgtgagagcatgtcacttgcccgaaagcccaccaaactttataatcttcaaataacctaactaccctcattttataaagaaatttggcatgtagataaaaaatttccaaatgctagacaaaaataaatgttgataataaataataattgcgtaatgttccacaatgtcaagagggtcaaggccagtctcttccccttggtgtttgtggttggttgtgtgtggtgttggttgtttcccgcgttcggcttttctgtatttgacagtgcataccaagagatcattaaacgtttatccgaaatctatacactatagaagtaattaataaatcctctgacagaaaaagcccttttaacatatcctatctagtgcgaagttgggcgtggagtaaagcttgagtaactagctggtccgaacatgctaacgagtcgatggggtaacaggaaaaagggcgaataccataatcatggctacgccagagtacatgacttgacgatacaacaggatggaactaagtcacctaaatgggcacgaggaacatgcaagcagacgcagttgccgaaagttggcaaaagacgatagcaattcaagggttggtggacagcccacatggataaggttggaagagc

SEQ ID NO: 65 - DNA, 1136 bp, synthetic construct
  misc_feature 1..1136: note = DNA standard
  source 1..1136: mol_type = other DNA
gctcttctgggtacattccatcggctcaacccgatgccgttacccgggctccctcccccccagctttcaccccctccctcgcgcgcttcgccgcgccaaaccgcccggagccaacccccttccgacctctacggctccgtgccgctcaccctccatatgctggcgttgcgttggcccggcgtcaccccaattcccggcccctttccggtgcttatccggagtcggggatgtggcacgggggcgcgccgaactcacccgcttgagccacgggttacacccagctcgtcggaaccattccccgttggttattgcatctctgtcttcccgtcctgcagagtccactcccccctatctatcagtactctagatgtccgatgcaccgagagtggggtcacaaactatccgggcggccagacgacacaagactactacgaatcttccagcgaaagagaccaaatcaactagcgcagcctcctaccccttttctctatcgcgtccacccatctttgtttattgattgtgacttcctgatctgctgtttatagcctgactctaaccgtagcagtcattgcacgaagaaggatgaatgctgaatcccagtcccggggcatattagcccaataaaggggcattaaaactaaagaatattatagtaccaccaacaagaaaaagaacaagtttgctaaaatagaaccgattagccagaagggttgttcggagagtcggtacgcaggccgagggaccacttttactaaattccattttgggagcggcgtgcatataactacccgcactcgatgcttgccgaaggaaggtggacagctaaggttcggcatcaagtccacgtggtacgcagaaaacagctcgggaatagataacaccatgtacgccagcgcggttcacgatgatgcgacttaaattagaacgacgtgtcccccaggccttgaggtcgtaacctggtaacgaaggggtcagataccttcctgcaaggagttattattcgttgtagcatgtcccttgctactcaaagttggcctatgtcttaacagtatgttcagaacttccctttcttcaagttaaaataaaatgtccctataaacgtatacgtaatgaagaatgacattaaattgaagagc

SEQ ID NO: 66 - DNA, 1148 bp, synthetic construct
  misc_feature 1..1148: note = DNA standard
  source 1..1148: mol_type = other DNA
gctcttctgggtacattccatcggctcaacccgatgccgttacccgggctccctcccccccagctttcaccccctccctcgcgcgcttcgccgcgccaaaccgcccggagccaacccccttccgacctctacggctccgtgccgctcaccctccatatgctggcgttgcgttggcccggcgtcaccccaattcccggcccctttccgctgcttatccggagtcggggatgtggcacgggggcgcgccgaactcacccgcttgagccacgggttacacccagctcgtcggaaccattccccgttggttattgcatctctgtcttcccgtcctgcagagtccactcccccctatctatcagtactctagatgtccgatgcgccgagagtggggtcacaaactatccgggcggccagacgacacaagactactacgaatcttccagcgaaagagaccaaatcaactagcgcagcctcctaccccttttctctatcgcgtccacccatctttgtttattgattgtgacttcctgatctgctgtttatagcctgactctaaccgtagcagtcggttggtgctaaaatggacgcattgcacgaaggaggatgaatgctgaatcccagtcccggggcatattagcccaataaaggggcattaaaactaaagaatattatagtaccaccaacaagaaaaagaacaagtttgctaaaatagaacttagccagaagggttgttcggagagtcggtacgcaggccgagggaccacttttactaaattccattttgggagcggcgtgcatataactacccgcactcgaccgaaggaaggtggacagctaaggttcggcatcaagtccacgtggtacgcagaaaacagctcgggaatagataacaccatgtacgccagcgcggttcacgatgatgcgacttaaattagaacgatgtgtcccccaggccttgaggtcgtaacctggtaacgaaggggtcagataccttcctgcaaggagttattattcgttgtagcatgtcccttgctactcaaagttggcctatgtcttaacagtatgttcagaacttccctttcttcaagttaaaataaaatgtccctataaacgtatacgtaatgaagaatgacattaaattgaagagc

SEQ ID NO: 67 - DNA, 1000 bp, synthetic construct
  misc_feature 1..1000: note = DNA standard
  source 1..1000: mol_type = other DNA
gctcttcaggttctggggtgcccttgagtcaccgccggccagcgatgctggagttcattctccagtggaccgcgaggcagggagcacagtgaggctgtggcagcgaccccgttacgagaggtgcccaagcacccaaagcacttgtgaggattcggaggcttcggtattggcgaacggtcttagcctgatggggcggggggagggggctggttaatactaacacgacgtgcacacaaaagtaaattgaagccaaccacaacacaacaacactaactataataggactataattgtcgttataaagactcaaaagatataggtttgtaacgatatcctccttgctgctcccataggccacgcagacgcaccctccagcgcggagagttgaccagcgctatgtgcagtagtgagccgaactatatactcgcttcaaaaaggcgttgagatggacgaccacagagctaagatctaaggttaaaaaacccttctagagcagcattgcagaaatagttttcgccccggtagagatgtgggagacaaagacaaataaaacatagttagaacaagtatcaaatacatacactttagccacatcgaatatccgttcaaataagaaaattcgaagcatctatatatggaaaatgataagagcttcatcaacgtttaattcgctttcataaggtttacaaaaaagccaaatcaccattgaactaaggtttaaagatcatttgacatcaaatgtttaagatactatcttatcaaacgataactgattcggagtttacaaattgggtggattggtacaatttttctaataacttctatgatcgataatcggggtgttcacatgatctagacccatatttgtttgctaaatccgtaacataagtataatagcttgtaagctcagtgcatcggctataagcaacgagttaagcaatgaaatactccgttcgacatttttttgcaatcagaattgcacatagttgtttcgaagagc

SEQ ID NO: 68 - DNA, 997 bp, synthetic construct
  misc_feature 1..997: note = DNA standard
  source 1..997: mol_type = other DNA
gctcttcaggttctggggtgcccttgagtcaccgccggccagcgatgctggagttcattctccagtggaccgcgaggcagggagcacagtgaggctgtggcagcgaccccgttacgagaggtgcccaagcacccaaagcacttgtgaggattcggaggcttcggtattggcgaacggtcttagcctgatggggcggggggagggggccggttaatacacaaaagtaaattgaagcaccaaccacaacacaacaacactaactataataggcctataattgtcgttataaagactcaaaagatataggtttgtaacgatatcctccttgctgctcccataggccacgcagacgcaccctccagcgcggagagttgaccagcgctatgtgcagtagtgagccgactctcattcaactatatactcgcttcaaaaaggcgttgagatggacgaccacagagctaagatctaaggttaaaaaacccttctagagcagcattgcagaaatagttttcgccccggtagagatgtgggagacaaagacaaataaaacatagttagaacaagtatcaaatacatacactttagccacatcgaatatccgttcaaataagaaaattcgaagcatctatagatggaaaatgataagagcttcatcaacgtttaattcgctttcataaggtttacaaaaaagccaaatcaccattgaactaaggtttaaagatcatttgacatcaaatgtttaagatactatcttatcaaacgataactgattcggagtttacaaattggatggattggtacaatttttctaataacttctatgatcgataatcggggtgttcacatgatctagacccatatttgtttgctaaatccgtaacataagtataatagcttgtaagctcagtgcatcggctataagcaacgagttaagcaatgaaatactccgttcgacatttttttgcaatcagaattgcacatagttgtttcgaagagc

SEQ ID NO: 69 - DNA, 1135 bp, synthetic construct
  misc_feature 1..1135: note = DNA standard
  source 1..1135: mol_type = other DNA
gctcttctggaaacagaagtttaataagtagtttctccagtaaaaccttaagttatcaacgtaaattgtcactctatgcatgagcttacggcgactacctagatcccaaccatttgacgggacttcccctcgtcatacattcgcaccagttttcaaaataaaagcgttactactcttatagttggagcaactcgagatccctctcctgtagcttttttattagttctggaagatacaaagtgcaacgcctcttaagtgacccctattagtgcagaatccattcaaaacattttccctattcggcagataataagcatgtctcttcacatctcgaagataagaataaagctgtcaactttaatttacatctttcgataaaagttgagcacttttcatctatattaagaagaatgagccgtgaggtaaatctctgctccgagtctcataatgtcacgcaaccgcgtgtcagcagctggccaccaacaagagtgaatatgactttaaccgtttcatatttgttttaggtctcattttataactaaattcaatagtctagtatataacacttgcgttctttacgaatgtaacatgtacttttaaaacctaagagagagacagaatactagatctcttgccctccacctatataattaagatatacgtgattatctataatgatcgtgttcattagtttatttgtctaaagtctgaaattgcccattatcaacgaaagtacacagtatcctcctccacgctctcctaaagaacaagtgcagtaccggggcaatacaatctcaaatcacgttctttaggccgcgggccttggaattagaacaattattcgctctgcgattcctatgtttacttaatcctgcacgggctacacttcgcgctcttagaatgttacaacttaagtatatctcgcctatcgattcagcctcttttgtgtctacaatttttgaatgctggaatggcggaagtgaggtaacctagtggggacttgcttgatgggggcgatgacgctttctggtgaacggctagcttaactcagcggtgttctagttagattgataccctacacgcgttctcgctgtgttttagcttttgaaagcagctaagtcgttgcaggaagagc

SEQ ID NO: 70 - DNA, 1123 bp, synthetic construct
  misc_feature 1..1123: note = DNA standard
  source 1..1123: mol_type = other DNA
gctcttctggaaacagaagtttaataagtagtttctccagtaaaaccttaagttatcaacgtaaattgtcactctatgcatgagcttacggcgactacctagatcccaaccatttgacgggacttcccctcgtcatacattcgcaccagttttcaaaataaaagcgttactactcttatagttggagcaactcgagatccctctcctatagcttttttattagttctggaagatacaaagtgcaacgcctcttaagtgacccctattagtgcagaatccattcaaaacattttccctattcggcagataataagcatgtctcttcacatctcgaagataagaataaagctgtcaactttaatttacatctttcgataaaagttgagcacttttcatctatattaagaagaatgagccgtgaggtaaatctctgctccgagtctcataatgtcacgcaaccgcgtgtcagcagctggccaccaacaagagtgaatatgactttaaccgtttcatatttgttttacattggtctcattttataactaaattcaatagtctagtatataacacttgcgttctttacgaatgtaacatgtacttttaaaacctaagagagagacagaatactagatctcttgctctccacctttataattaagatatacgtgattatctataatgatcgtgttcattagtttatttgtctaaagtctgaaattgcccattatcaacgaaagtacacagtatcctcctccacgctctcctaaagaacaagtgcagtaccggggcaatagaatctcaaatcacgttctttaggccgcgggccttggaattagaacaattattcgctctgcgattcctatgtttacttaatcctgcacgggctacacttcgcgctcttagaatgtttcgcctctcgattcagcctcttttgtgtctacaatttttgaatgctggaatggcggaagtgaggtaacctagtggggacttgcttgatgggggcgatgacgctttctggtgaacggctagcttaactcagcggtgttctagttagattgataccctacacgcgttctcgctgtgttttagcttttgaaagcagctaagtcgttgcaggaagagc

SEQ ID NO: 71 - DNA, 964 bp, synthetic construct
  misc_feature 1..964: note = DNA standard
  source 1..964: mol_type = other DNA
gctcttcaattcgctaaggcgcgaagttattatttaatgattagagtccaggatttccacttttgagtttcattcccatattttcgcgattagttcttaatggctgaagcgttccgataagacggatggagataaagaatggcgcaatgcgaagaagaggagagaggtctaataactaaatattcacgctaagacatcataatcaatcccctgacataataaattatcagatcaaaacagatgagattcatattagaacgttgaacttataggatttaaaaaccgtccgcttaacaatcagaggcgttatatctatattcggtgctaaagttccttcgtagaacatatcctgacccccccccgccatcccataattcagaatcgaagttgtgctgcggtaccgccgcattatgttttgtggacctggggcactcttcttttggatcatacctcctatgcctcctgatctttccagccaggctgtcccttccccatactgtcttggcgcttctcaggagaacattctcaaatgaaatcgtcaaatgataggtcgcggaccgttagtcggtcgtagcaatattacgtaggccagaacgctactaggtactctcgcagtataaagttcttcattcattgaaatcctatgactgtcatagagttatttatggaagaatagttacacgcgttgcatcaatattatcttagttagaggttaaagaaacatcataatttccggcaaagcagccgtatatctaccttctagtgcctcacacctgtttagcttgatgtaagaaataaattaaatagtcctctcaccaaataactatttagaatgtgttcctacacaactgctgctctggaaaaagtattttttggggtgtcacagcggtgaaacgggcgttagtgcggcatcgataagagggatagggtatgcaacagaatgggtaaaccgtggaagaagagc

SEQ ID NO: 72 - DNA, 960 bp, synthetic construct
  misc_feature 1..960: note = DNA standard
  source 1..960: mol_type = other DNA
gctcttcaattcgctaaggcgcgaagttattatttaatgattagagtccaggatttccacttttgagtttcattcccatattttcgcgattagttcttaatggctgaagcgttccgataagacggatggagataaagaatggcgcaatgcgaagaagaggagagaggtctaataactaaatattcacgctaagacatcataatcaattccctgacataataaaacagatgagattcatattagaacgttgaacttataggatttaaaaaccgtccgcttaacaatcagaggcgttatatctatattcggtgctaaagttccttcgtagaacatatcctgacccccccccgccatcccataattcagaatcgaagttgtgctgcggtaccgccgcattatgttttgtgaacctggggcactcttcttttggatcatacctcctatgcctcctgatctttccagccaggctgtcccttccccatactgtcttggcgcttctcaggagaacattctcaaatgaaatcgtcaaatgataggtcgcggaccgttagtcggtcgtagcactagtatattacgtaggccagaacgctactaggtactctcgcagtataaagttcttcattcattgaaatcctatgactgtcatagagttatttatggaagaatagttacacgcgttgcatcaatagtatcttagttagaggttaaagaaacatcataatttccggcaaatagtgcagccgtatatctactttctagtgcctcacacctgtttagcttgatgtaagaaataaattaaatagtcctctcaccaaataactatttagaatgtgttcctacacaactgctgctctggaaaaagtattttttggggtgtcacagcggtgaaacgggcgttagtgcggcatcgataagagggatagggtatgcaacagaatgggtaaaccgtggaagaagagc

SEQ ID NO: 73 - DNA, 1038 bp, synthetic construct
  misc_feature 1..1038: note = DNA standard
  source 1..1038: mol_type = other DNA
gctcttcgtttgccattatttccgacgccattcatggtagggtactaaaggttaaattacactagagattttctaaggaaaggagaatatgagtattaggttatgaaaaattcattgatatttgtgttctctttaaattttcgaatgtttgttgttagtaaatcatctaatacaaataataatatagaagaagtatatgtgtgtattatctaccggttcttttattggagcgtttgacccataagtgggaagcgatgtcttagtaaaagcaaccagctattttcgtgataatacacctagtcatagttggactagaagagacataaaaaagcataagtaaagagaagacacctttcgtgttagggtacttgccattgcgtttccgaccgtctcttcattttcttctcatatctgtgaaatcggttctcagctgactagctaaatgtggtgtggtttcaaggcttagttttatcttgcggttagtggtcgtcgtttcatcattgtccttggaatagtttctgcagtccctaggggcatgtctatagtacccagatctgtttcgcttgcctcgttctctagtacattcgacaaagatactataagttgactgtattgggttagttccataaactcgactttttttcgtttcatatggagtttggactgatccggcggactgaacagtataaatagaagcctcgatgaaaggtgggaatcgttggtcccccgttagccactcccttgatgaggataaaaagtaacaaactaaataaatcgtgtattttggtattatttaataagaattagcaaaaatagtttggacccaaattagtcaaataaagcacaatgctttttggttgctttccgatattctacgacttatactaacgaaagcaaatccaaagcgaatacgatgttcctccacggagttatatcgatggagaaacttatttgtattatattatcgatcatcgccaacaacaatctctaaatctaggctatttttgtgcctggaatactattcatttttcgaagagc

SEQ ID NO: 74 - DNA, 1014 bp, synthetic construct
  misc_feature 1..1014: note = DNA standard
  source 1..1014: mol_type = other DNA
gctcttcgtttgccattatttccgacgccattcatggtagggtactaaaggttaaattacactagagattttctaaggaaaggagaatatgagtattaggttatgaaaaattcattgatatttgtgttctctttaaattttcgaatgtttgttgttagtaaatcatctaatacaaataataatatagaagaagtatatgtgtgtattgtctaccggttcttttattggagcgtttgacccataagtgggaagtgatgtcttagtaaaagcaaccagctattttcgtgataatacacctagtcatagttggactagaagagacataaaaaagcataagtaaagagaagacacctttcgtgttagggtacttgccattgcgtttccgaccgtctcttcattttcttctcatatctgtgaaatcggttctcagctgactagctaaattcttgcggttagtggtcgtcgtttcatcattgtccttggaatagtttctgcagtccctaggggcatgtctatagtacccagatctgtttcgcttgcctcgttctttagtacattcgacaaagatactataagttgactgtattgggttagttccataaactcgactttttttcgtttcatatggagtttggactgatccggcggactgaacagtataaatagaagcctcgatgaaaggtgggaatcgttggtcccccgttagccactcccttgatgaggataaaaagtaacaaactaaataaatcgtgtattttggatttattatttaataagaactagcaaaaatagtttggacccaaattggtcaaataaagcacaatgctttttggttgctttccgatattctacgacttatactaacgaaagcaaatccaaagcgaatacgatgttcctccacggagttatatcgatggagaaacttatttgtattatattatcgatcatcgccaacaacaatctctaaatctaggctatttttgtgcctggaatactattcatttttcgaagagc

SEQ ID NO: 75 - DNA, 1071 bp, synthetic construct
  misc_feature 1..1071: note = DNA standard
  source 1..1071: mol_type = other DNA
gctcttcggaagatacccccataggcaagtgtcgtctacgtcgccgctgcacggccttttatgattatgaaatgatcgagttatggtataagaaaggataaggttacacaattgtgaactaattgtcgttgcttttatttgtttatattcatggttttctagccccaaatctatccccaatagttataggtttaatgtaaaccatataagagatcgttcacactatatcttggagatagatcacctaatccatgcgttctgacgtgttgaggaattgttctaaacataagacctagggggattataaggcacgctaacgcgtcttactcgatcacgtacattagggtgatccggtaatgcagaatcttgaaaataagaccgcatttactggctcaaactctaccatctatttttatttacgtttagttttctaccctccagcatttttagctgtttgggactttctgagtaagtggagtttcacatgcagaagcagtaacatgagacatattgaccaccccctggtgaacgaatttcgtctgatattaatctctagatttatgaacattatacactcaatttgtgaatcctctacaatatattatccattcactttttaacataatttaaatatacgggaaaatgtagacagtcatcctctttaccgtttctcggcaaccagtttggttgtgatttaaacgtttctctgtctatgcgtttctgttgttgcatttttttctggcgtgtaacttattctctcttttgttagtgtgatgctactatcctatcttgtgttgttaggtcgacctactattttgccaatcctcccaccctcccttaccaaccaagaaccccattttaccgcaccatcggaccgacaatccggtaactctgccccgatctgcagattaggttactgtgaaaggtggtgaggagaagtaggctccctccagggtatcggcaacgcagccccgggaccttgctctgcaagcatcagcgtggccggtgatgcaccattgggctcaccttctctcgctcgtaccgactgcagcttaaacgtagtcgaagagc

SEQ ID NO: 76 - DNA, 1076 bp, synthetic construct
  misc_feature 1..1076: note = DNA standard
  source 1..1076: mol_type = other DNA
gctcttcggaagatacccccataggcaagtgtcgtctacgtcgccgctgcacggccttttatgattatgaaatgatcgagttatggtataagaaaggataaggttacacaattgtgaactaattgtcgttgcttttatttgtttatattcatggttttctagccccaaatctatccccaatagttataggtttaatgtaaaccatataagatcgttcacactctatcttggagatagatcacctaatccatgcgttctgacgtgttgaggaattgttctaaacataagacctagggggattataaggcacgctaacgcgtcttactcgatcacgtacattagggtgatccggtaatgcagaatcttgaaaataagaccgcatttactggctcaaactctaccatctatttttatttacgtttagttttctaccctccagcatttttagtttttggcccgcactgtttgggaatttctgagtaagtggagtttcacatgcagaagcagtaacatgagacatattgaccaccccctggtgaacgaatttcgtctgatattaatctctagatttatgaacattatacactcaatttgtgaatccatattatccattcactttttaacataatttaaatatacgggaaaatgtagacagtcatcctctttaccgtttctcggcaaccagtttggttgtgatttaaacgtttctctgtctatgcgtttctgttgttgttcatttttttctggcgtgtaacttattctctcttttgttagtgtgatgctactatcctatcttgtgttgttaggtcgacctactattttgccaatcctcccaccctcccttaccaaccaagaaccccattttaccacaccatcggaccgacaatccggtaactctgccccgatctgcagattaggttactgtgaaaggtggtgaggagaagtaggctccctccagggtatcggcaacgcagccccgggaccttgctctgcaagcatcagcgtggccggtgatgcaccattgggctcaccttctctcgctcgtaccgactgcagcttaaacgtagtcgaagagc

SEQ ID NO: 77 - DNA, 1138 bp, synthetic construct
  misc_feature 1..1138: note = DNA standard
  source 1..1138: mol_type = other DNA
gctcttcagagaggaaataaatcctgaactgtaagaccccaggatttgtgatcagtaacacaaccacaaggcttaagtccgtttcctcagtaacgaaataatgtaaggaagattcaacacacatcctccactagatgcacatcgcacgattgacgactgaatctgaaatgaagagtaagcgaaaccgtgtggcatacaaaagggtaaaaccgtgctctccctctcaaacgtgctaaataaacgatggccgtagttcagatgagaagtgagaatttcaatgagatagaaaaaggaagatatgggaaaccggtacctggggggaaaatattggccaaattttatgatgaattattgtgcaggaagatttatagagaaatacaaagattattattgtagtattcttgttcacacataactattattagactttaagatagtagttatgagactgtttaatagaaagtagaggttcctctcccgtagctatatgagactatgacatgtgactcccatattgggctaagtcgcttcggggtatctgttttccaatcgggtcgtgactatacatttttttttgttgtggtattttttagctcataacagcaaatatagagtcaccccgaactattgctattgtagtaaccagccattatcctgcagcctatttagcgtggttccggactgtgcatttccttttgcaatatttgagtcagaatcctatacactctgttcatagtatgtgtcgtttctctacttcacgattatgattttatcccttttttgcttctgcggcgtgaattggtatgatgtgttggtatgggtgtgcctatttagaattgtacgtaaaggtccttgggtctcaatgattgtctcgtgattttccatccctggactgttcataatgtacatgacttagttcgtgggcacaatgaatcgtaggagtgggcgaggagtcttcccagacgccgtcccgcctagggccctaagaaacctcccgtgtatcccgttcgcaggtgattaaaggcatcggaggataaggtaagcggttatgcctgtgggtagctcggtagtagcgagggtggtatcaggtaaggttgaagatcgctggacgtttatctgttagactcacacgaagagc

SEQ ID NO: 78 - DNA, 1145 bp, synthetic construct
  misc_feature 1..1145: note = DNA standard
  source 1..1145: mol_type = other DNA
gctcttcagagaggaaataaatcctgaactgtaagaccccaggatttgtgatcagtaacacaaccacaaggcttaagtccgtttcctcagtaacgaaataatgtaaggaagattcaacacacatcctccactagatgcacatcgcacgattgacgactgaatctgaaatgaagagtaagcgaaaccgtgtggcatacaaaagggtaacaccgtgctctccctctcaaacgtgctaaataaacgatggccgtagttcagatgagaagtgagaatttcaatgagatagaaaaaggaagatatgggaaaccggtacctggggggaaaatattggccaaattttatgatgaattattgtgcaggaagatttatagagaaatacaaagattattattgtagtattcttgttcacacataactattattagactttaagttatgagactgtttaatagaaagtagaggttcctctcccgtagctatatgagactatgacatgtgactcccatattgggctaagtcgcttcggggtatctgttttccaatcgggtcgtgactatacatttgtgtttttttttttgttgtggtattttttagctcataacagcaaatatagagttacccagaactattgctattgtagtaaccagccattatcctgcagcctatttagcgtggttccggactgtgcatttccttttgcaatatttgagtcagaatcctatacactctgttcttctttatagtatgtgtcgtttctctacttcacgattatgattttatcccttttttgcttctgcggcgtgaattggtatgatgtgttggtatgggtgtgcctatttagaattgtacgtaaaggtccttgggtctcaatgattgtctcgtgattttccatccctggactgttcataatgtacatgacttagttcgtgggcacaataaatcgtaggagtgggcgaggagtcttcccagacgccgtcccgcctagggccctaagaaacctcccgtgtatcccgttcgcaggtgattaaaggcatcggaggataaggtaagcggttatgcctgtgggtagctcggtagtagcgagggtggtatcaggtaaggttgaagatcgctggacgtttatctgttagactcacacgaagagc

SEQ ID NO: 79 - DNA, 1113 bp, synthetic construct
  misc_feature 1..1113: note = DNA standard
  source 1..1113: mol_type = other DNA
gctcttcctttacaaccgatctgttactttacctctttttatccggagaatatacacgaattattaaaattccgtgtgctaacagcgattactatataataaatatatccttggatggccttagaaaccattgtattgtcttagcagccctccacaaggactctcaataaggttcctatctactgtacctgacaattcacaacattgttgctcctcaagataattggtaatgacggtcatccccgggtacgtggttaatgctcgagatgaaacgatcaatcgcgagaagatagaaaacgagacaaaccaaacaaaaaatactaattcagggtcggcgctcaggccaatcccgacacctttttaaacggtctattgacacatggcatggactagagcaagttgataatagaatttatccaactgcgacacaacacaaaatgtactactcacgtctacacccgtattttacgacttcctatctctttacttggtgatgtaggatatggactatgaagaaggaggggccggggttcttcggcccggagagatagcaagggcaaagagaagggtggaacgagtggagaagacggaggaaagtgggagcggaggggaaggggtaggaagcaagacgagcgcggcatttagtttcattgataaacattatttaaccatgataatagagtatagttcttacgatcatcttaaagcagttagtacataggaaactgttgaaagctaacagcatagtcaactacaaaaataaatacattcggacttaagttcacgggaagcatcgttatatatttttattcacggcgtgtgtactctaatagcagggcgccggacagctagagaaaaactaaaccctggtttggtgaggcgtatcgccaggtagcagccccactaagggtgtagccggcgggaagtatcagttgcgctggtgggtttgctgcctactatctctacccctctagtttagtcttatgtacactaactaagctttccaattgatcgtccgctagaagtgaagtgacaacaatactgtcgatatatcttgcacacgataagataatcgccatctcggaataaatgaagatgccagcaaagaagagc

SEQ ID NO: 80 - DNA, 1091 bp, synthetic construct
  misc_feature 1..1091: note = DNA standard
  source 1..1091: mol_type = other DNA
gctcttcctttacaaccgatctgttactttacctctttttatccggagaatatacacgaattattaaaattccgtgtgctaacagcgattactatataataaatatatccttggatggccttagaaaccattgtattgtcttagcagccctccacaaggactctcaataaggttcctatctactgtacctgacaattcacaacattggtgctcctcaagataattggtaatgacggtcatccccgggtacgtggttaatgctcgagatgaaacgatcaatcgcgagaagatagaaaacgagacaaaccaaacaaaaaatactaattcagggtcggcgctcaggccaatcccgacacctttttaaacggtctattgacacatggcatggactagagcaagttgataatagaatttatccaactggacacaacacaaaatgtactactcacgtctacacccgtattttacgacttcctatctctttacttggtgatgtaggatatggactatgaagaaggaggggccggggttcttcggcccggagagatagcaagggcaaaaggaaagtgggagcggaggggaaggggtaggaagcaagacgagcgcggcatttagtttcattgataaacattatttaaccatgataatagagtatagttcttacgatcatcttaaagcagttagtacataggaaactgttgaaagctaacagcacagtcaactacaaaaataaatacattcggacttaagttcacgggaagtatctttcttttgttatatatttttattcacggcgtgtgtactctaatagcagggcgccggacagctagagaaaaactaaaccctggtttggtgaggcgtatcgccaggtagcagccccactgagggtgtagccggcgggaagtatcagttgcgctggtgggtttgctgcctactatctctacccctctagtttagtcttatgtacactaactaagctttccaattgatcgtccgctagaagtgaagtgacaacaatactgtcgatatatcttgcacacgataagataatcgccatctcggaataaatgaagatgccagcaaagaagagc

SEQ ID NO: 81 - DNA, 951 bp, synthetic construct
  misc_feature 1..951: note = DNA standard
  source 1..951: mol_type = other DNA
gctcttcatctggtgcatcccctgcttcctcgcttggcgtcgatgggccaccctctcgagcgttgaggccgtcggggtgttcaccgccggggttccgcaggggacagccacagcgtcacaactggtccaccggcccgtgcttcacatcattgggcttcgtggtgtctgtgtccgcggttgttcgtcacctgctcaatggacgcctatgcgacccgcgcctatccctcctaagcatgaatcacaaatcatccgaagttctccgttctggccatgaacctatctgcgtgctttgggagatcaggataacactaaaatcccattttcagttgcgtattcctgtaaacgcccgaagagttttgttggtagagaatacccaaattgccgagattgaggcttaacatcaaggaggcaggaactagcaggatgcggcctcggtggagagatggcagccgtcatttcagtccgctcgacaaaggcaacgagcttacaacgacaaaaaaaacaaaaaatgaaaaaacattaactagttttccgttacttcggaatacaaaacctaagtgcctcgtgcaaaacggaggtggaacggaacgggagatgccgcacccaaaacaaacccacccacaacaacacacccccaaaaaactttgcgccctacgatagatactatccaggcggactttcgccgggtactcacaaacattataagttttctattcttaaaacagatgacgggagtgtttcatggacagaacactaaactgatatatggtcaataaaatgaataggtgaagatgagtgaagacagaaagaccgtccatctacgatttcggggctagaagacgagctgctaaaataagcagcctacaacatagtcgtaacatgtttcttcaatgactaccacaaattggtgctctattgtatggggaaagacctggctaaacaccgaagagc

SEQ ID NO: 82 - DNA, 924 bp, synthetic construct
  misc_feature 1..924: note = DNA standard
  source 1..924: mol_type = other DNA
gctcttcatctggtgcatcccctgcttcctcgcttggcgtcgatgggccaccctctcgagcgttgaggccgtcggggtgttcaccgccggggttccgcaggggacagccacagcgtcacaactggtccaccggcccgtgcttcacatcattgggcttcgtggtgtctgtgtccgcggttgttcgtcacctgctcaatggacgcctatacgacccacgcctatccctcctaagcatgaatcacaaatcatccgaagttctccgttctggccatgaacctatctgcgtgctttgggagatcaggataacactaaaatcccattttcagttgcgtattcctgtaaacgcccgaagagttttgtttgtagagaatacccaaattgccgagattgaggcttaacatcaaggaggcaggaactagcaggatgcggcctcggtggagagatggcagccgtcatttcagtccgctcgacaaaggcaacgaaaaaaaacaaaaaatgaaaaaacattaactagttttccgttacttcggaatacaaaacctaagtgcctcgtgcaaaacggaggtggaacggaacgggagatgaacccacccacaacaacacacccccaaaaaactttgcgccctacgatagatactatccaggcggactttcgccgggtactcacaaacattataagttttctattcttaaaacagatgacgggagtgtttcattgacagaacactaaactgatatatggtcaataaaatgaataggtgaagatgagtgaagacagaaagaccgtccatctacgatttcggggctagaagacgagctgctaaaataagcagcctacaacatagtcgtaacatgtttcttcaatgactaccacaaattggtgctctattgtatggggaaagacctggctaaacaccgaagagc

SEQ ID NO: 83 - DNA, 1129 bp, synthetic construct
  misc_feature 1..1129: note = DNA standard
  source 1..1129: mol_type = other DNA
gctcttccggtttagatccttaatttgtcgggtaataatcagaagagggaaagattttgatctggtataccatctagacttaggtgacccagagattattggccttctaacatctgcgctaccttgatccccctcggggctaactagatgggctactcggatgaagtctgccgacctagagcgcaaaacaagcacccccggggaggtaaagcaaccctaattataaatcaactcaagatgatattatattttaattcactattatcggttcgattgtaatgtgcgggattctcttttagggacacgaggtcacaccgactattcgaggtcgcgggtagccaatcccatcgttggtcatctaaagaatgcagaagtacttgtagctacgagcttgttactctgctctatggtgccgagttgcactcggtagataagggggcagggatagcaatcgtgagaaaaaacgagttaatactggttcaaggctggataaatatggagataagggtatgggatggcatgaacagtgctacagtgtgtaggaatggatgaggcaaaaaaaaggggataaatgtaaggaagcgctgaagtaggaggaaatgagtgggttacttacatatcgcatttaaatgctaattcctcatacgtcccctttattccaacgagctgttttttagtagattcagatagttggtccatacaataactatattttgtaacaaacaaacgagacagcaattacacagcatactttcataatcacattagctagttatattagggcgtttatcccgtacgcgacggcctactgcgaaagcatagcgtttgcaatgacgtaccaccctgtgtgatccgaccatggcggaagctcattagcgtagcgaaagtttgtgtttacggatcgcatatttaagaagtgttggtgtggttggtggtttgtgttggtggttttggtgggcagcgttacggttagttaacctccctagttcttctcgaaggttcggtttccttatccgtacgcctacggcttcctcagacaaagacactacatccttccctccttgccttcacctctcttggctcgcatacagctttatcggcgataactcaaaacaacctagtgaagagc

SEQ ID NO: 84 - DNA, 1135 bp, synthetic construct
  misc_feature 1..1135: note = DNA standard
  source 1..1135: mol_type = other DNA
gctcttccggtttagatccttaatttgtcgggtaataatcagaagagggaaagattttgatctggtataccatctagacttaggtgacccagagattattggccttctaacatctgcgctaccttgatccccctcggggctaactagatgggctactcggatgaagtctgccgacctagagcgcaaaacaagcacccccggggaggtgaagcaacataacttcgcttactaaagattcctaattataaatcaactcaagatgatattatattttaattcactattatcggttcgattgtaatgtgcgggattctcttttagggacacgaggtcacaccgactattcgaggtcgcgggtagccaatcccatcgttggtcatctaaagaatgcagaaatacttgtagctacgagcttgttactctgctctatggtgccgagttgcactcggtagataagggggcagggatagcaatcgtgagaaaaaacgagttaatactggttcaaggctggataaatatggagatgatggcatgaacagtgctacagtgtgtaggaatggatgaggcaaaaaaaaggggataaatgtaaggaagcgctgaagtaggaggaaatgagtgggttacttacatatcgcatttaaatgctaattcctcatacgtcccctttattccaacgagctgttttttagtagattcagatagttggtccatacaataactatattttgtaagaaacaaacgagacagcaattacacagcatactttcataatcacattagctagttatattagggcgtttatcccgtacgcgacggcctactgcgaaagcatagtgtttgcaatgacgtaccaccctgtgtgatccgaccatggcggaagctcattagcgtagcgaaagtttgtgtttacggatcgcatatttaagaagtgtggttggtggtttgtgttggtggttttggtgggcagcgttacggttagttaacctccctagttcttctcgaaggttcggtttccttatccgtacgcctacggcttcctcagacaaagacactacatccttccctccttgccttcacctctcttggctcgcatacagctttatcggcgataactcaaaacaacctagtgaagagc

SEQ ID NO: 85 - DNA, 993 bp, synthetic construct
  misc_feature 1..993: note = DNA standard
  source 1..993: mol_type = other DNA
gctcttcaattgtactttcgtatatttttggattggctgtagaaagtataaaggggagggcggtaaagtttatttggttttagtcatttatttttttaacagcgtcttcacattagttgaagtataataacataattcgagtttcattaaaagaaacattgataacctaaagtttattatccagtcgttattataatcaacttgatctcaggataatggtcgacttaaagtcagtagaaggtttttaggagtcgagatcagttactgatgttcttttttcattgagtttacttcaccatacaccaaattttctaagcattgtgatttaatccagtgtcctttacttctgcatagatttaatgtataggtgtgagtgcaatgcaggccggagttcatgaagaaaaaaaaaaatagctcataaacaaccgcaaaagctcgatctttaattaagtcataactaaccattcgattccctttatgtcactgctcacaaccgcttaggatgtctctcatcttaatgtaaatacaacccaagtttcgatacggaccgccggtggcggccgcgcagcaggccgcgcgctctcccgagcagcatggcggggacgtgagtaacaagtgggcggggacggggggcgcggggcgggcggggccgcaacgagggcggggcggggtggcgcaggcggcgacgggggcgcgcagcggcgctcagtgcccatgtcctctgcccgacgacacgtactccatgtcggatctcgcaaaagagcagagtcttccgcgcatatcgcctacgagaactgcactaaagagagggaaggagggggcgcgggaaaggaagcacccgaggactttcgccttggaggggctgagagcggtgcgcagtgccgcatagcgctcgaactccgactagggcctaagggcgctgggcacagcctgcggcgttgtggctgacatgaaggggggtggcggtgtggcgtcgttgcaaaggagaagagc

SEQ ID NO: 86 - DNA, 1011 bp, synthetic construct
  misc_feature 1..1011: note = DNA standard
  source 1..1011: mol_type = other DNA
gctcttcaattgtactttcgtatatttttggattggctgtagaaagtataaaggggagggcggtaaagtttatttggttttagtcatttatttttttaacagcgtcttcacattagttgaagtataataacataattcgagtttcattaaaagaaacattgataacctaaagtttattatccagtcgttattataatcaacttgatcccaggataatggtcgacttaaagtcagtagaaggtttttaggagtcgagatcagttactgatgttcttttttcattgagtttacttcaccatacaccaaattttctaagcattgtgatttaatccagtgccctttacttctgcatagatttaatgtataggtgtgagtgcaatgcaggccggagttcatgaagaaaaaaaaaaatagaataaaaaaaaaaatattatagtactcataaacaaccgcaaaagctcgatctttaattaaatcataactaaccattcaattccctttatgtcactgctcacaaccgcttaggatgtctctcatcttaatgtaaatacaacccaagtttcgatacggaccgccggtggcggccgcgcagcaggccgcgcgctctcccgagcagcatggcggggacgtgagtaacaagtggacggggggcgcggggcgggcggggccgcaacgagggcggggcggggtggcgcaggcggcgacgggggcgcgcagcggcgctcagtgcccatgtcctctgcccgacgacacgtactccatgtcggatctcgcaaaagagcagagtcttccgcgcatatcgcttacgagaactgcactaaagagagggaaggagggggcgcgggaaaggaagcacccgaggactttcgccttggaggggctgagagcggtgcgcagtgccgcatagcgctcgaactccgactagggcctaagggcgctgggcacagcctgcggcgttgtggctgacatgaaggggggtggcggtgtggcgtcgttgcaaaggagaagagc

SEQ ID NO: 87 - DNA, 949 bp, synthetic construct
  misc_feature 1..949: note = DNA standard
  source 1..949: mol_type = other DNA
gctcttctatccacatcgttcgactcttaggcgagtttcccgatctggtaaaattaacagtatctgtggcttttcgtacttccggtcacggatagagcagggtaggagagggaaagaggcgggggaagtatggatggaagttgcattaaccaatttttcctttatctatatataagcttaatagattgataaactacaatatcggttttgcgggaggtccccggcctcgatcggtgacgctgacgtacaaaatcatccctatcactctgtcgcctcttttgttttataatgaaataacttgcctaattgacatttaaaatgaggaaatcagacgttaataattactgtagaatatcaccactcacatctatgactggaaacacggaaaaaccgcagagggagcccatcgatattagcgaatgttatataaatgggatcccggcaaccagcggaaaaaagcaaggttcgtacttcgacgattttcgagtctagaaggtgctcccctatttcctccgatatccctacttgtacatcattctttcaaacgatttctttagatagtatagctactaatagcgcatttataattttttaacttctatatctaagttcgattgtatgaatacagaccatttaaggaaactccaatatcaattaaaggggagtaagaagaaaaaataatatggaaacgggcgacactccgccaccgattcagggacacgcccggtgcaggtgcagccgtagttcacactcagggggacgttggtcatcggaggactggcccaggtgtcgggcctcggccacggcctagcgccctactcgactcttagctccaactgagaggtgcttcctccctagctcgtagaacacgaatagcccctatgcgttagggcgccaaagacaccatggtaccgaacggccctaaaccgcgcacgtagtcttgaagagc

SEQ ID NO: 88 - DNA, 972 bp, synthetic construct
  misc_feature 1..972: note = DNA standard
  source 1..972: mol_type = other DNA
gctcttctatccacatcgttcgactcttaggcgagtttcccgatctggtaaaattaacagtatctgtggcttttcgtacttccggtcacggatagagcagggtaggagagggaaagaggcgggggaagtatggatggaagttgcattaaccaatttttcctttatctatatataagcttaatagattgataaactacaatatcggttctgcgggagtgccaggggccacctctgggtccccggcctcgatcggtgacgctgacgtacaaaatcatccctatcactccgtcgcctcttttgttttataatgaaataacttgcctaattgacatttaaaatgaggaaatcagacgttaataattactgtagaatatcaccactcacatctatgactggaaacacggaaaaaccgcagagggagcccatcgatattagcgaatgttatataaatgggatcccggcaaccagcggaaaaaagcaaggttcgtacttcgacgattttcgagtctagaaggtgttcccctatttcctccgatatccctacttgtacatcattctttcaaacgatttctttagatagtatagctactaatagcgcatttataattttttaacttctatatctaagtggtcctgtatgaatacagaccatttaaggcaataaactccaatatcaattaaaggggagtaagaagaaaaaataatatggaaacgggcgacactccgccaccgattcagggacacgcccggtgcaggtgcagccgaagttcacactcagggggacgttggtcatcggaggactggcccaggtgtcgggcctcggccacggcctagcgccctactcgactcttagctccaactgagaggtgcttcctccctagctcgtagaacacgaatagcccctatgcgttagggcgccaaagacaccatggtaccgaacggccctaaaccgcgcacgtagtcttgaagagc

SEQ ID NO: 89 - DNA, 987 bp, synthetic construct
  misc_feature 1..987: note = DNA standard
  source 1..987: mol_type = other DNA
gctcttctcacatcccaagtcgctcgagacctccctaccacttggagtttgcccggctgtgaaacaaacgatcgttaactaacgctgattatagtgagagctacaacccttccatttgattgcttaagtgtgtattaaagtttataccgttcagaaacaccttaaattgcacctgcgggttcttaagtttcggcatactcaaagtaacctttcactccatttccagctgggttcgccaggtcccggcgcttgcttcgggcagtttgacgtataaatttttttcctcttgcttctatgtagtccgccatatactctccttatttcaagtccatcacacagctcattgcacgttcttcccgatcaacatgtcgcctacccagttcgaaatggacccattccctatctcccaggacaaaaacagtattcattttggtctgcattatgtgaggaaggagtcataattatttcttaatctgatgcttgctgttttcaaagtcaatagttcgacttaaatccactagtgctttatggtgagttaactttattgaacgcgacaaggatttatgatcatttttaagaaattttaattcacctcccatggttttttattgtattattctttctcccttttctacttggggtcaatacgattttataagctaataaggaagaacgataaggaccgatgatgttatctcatcgtagttaccgttatccaagttacaatattcttttcccgctccgcgagaagcggtgggtgtaaggcggcgggtgggttagccaatttaattcatacacttgccgaggcaaagccggaccccaaaggtgctaggtctgtgattcgtaagtatgtcgatgagctcccgagctatattacggcaaagagcaagattaacgtttcgttgatgcatgtctctgttagttgcgtttatggggtgtggcccactggatacctaccgcttgtcggggtgcgcgtgcttgaagagc

SEQ ID NO: 90 - DNA, 1006 bp, synthetic construct
  misc_feature 1..1006: note = DNA standard
  source 1..1006: mol_type = other DNA
gctcttctcacatcccaagtcgctcgagacctccctaccacttggagtttgcccggctgtgaaacaaacgatcgttaactaacgctgattatagtgagagctacaacccttccatttgattgcttaagtgtgtattaaagtttataccgttcagaaacaccttaaattgcacctgcgggttcttaagtttcggcatactcaaagtaatctttcactccatttccagctgggttcgccaggtcccggcgcttgcttcgggcagtttgacgtataaatttttttcctcttgcttctatgtagtccgccatatactctctccttatttcaagtccatcacacagctcattgcacgttcttcccgatcaacatgtcgcctacccagttcgaaatggacccattccctatctcccaggacaaaaacagtattcattttggtctgcattatgtgaggaaggagtcataattatttcttaatctgatgcttgctgttttcaaagtcaatagttcgacttaaatccactagtgctttatggtgagttaacttcaaggatttatgatcatttttaagaaattttaattcacctcccatggttttttattgtattattctttctcccttttctacttggggtcaatacgattttataagctaataaggaagaacgataaggaccgatgatgttatctcatcgtagtcaccggtatccaagttacaatattcttttcccgctccgcgagaagcggtgggtgtaaggcggcgggtcgtgggcgggtggttgagagtgagacggggggttaaccaatttaattcatacacttgccgaggcaaagccggaccccaaaggtgctaggtctgtgattcgtaagtatgtcgatgagctcccgagctatattacggcaaagagcaagattaacgtttcgttgatgcatgtctctgttagttgcgtttatggggtgtggcccactggatacctaccgcttgtcggggtgcgcgtgcttgaagagc

SEQ ID NO: 91 - DNA, 957 bp, synthetic construct
  misc_feature 1..957: note = DNA standard
  source 1..957: mol_type = other DNA
gctcttcctttctcgcatatgcgctcatttaattatgctcacggcgtagtttgttattattctattcccttgagaatccttatttctctttgaatcaccatctattttagtaactctatgtcacacttttcttttgccggatgggttagatatctccatgaaggaatgggccgatgtctaccttcctttaccgttgacgtacgcacaaacgttcctttttctcttcttctctctcttcttctctcttccttctgcaacacagaatttacaagtgtaccctcctctttttttcctttttccgctaccatgcatttctttttccttcttcttttttttcacaaaatctttgtgatattttaggacagtattaatatgtaatacgttctttaagggacatataaatttactaacacccctaatatgtgaacgaatttattagatagaatttgtaattcatttagatataaagtgataattattagacacagttacggaatttctagcatcacgacagaaactcctcataggctctcatacttatattatattcaaatactgatcaatagtacttaacaataaatagatggtaccaatataaactaaattactaaatagtacttttaggtagtaatggagtatgttaagatcacattatattttgtttcagagactctatttctggtaattgccttattggtatcaaggtaggggaataagcgaccacggagaaagctagaaacaacaattgactgcggcgtgggtccagtgatgcggataccagctagagtaagttgaaattggcacatgaatgtattcttgaaatcagtgaaagacgttacgaaggtgggccaataatatatgagaggccttcaatccaaaaagcgtaccttactaatcacaaatttttgatattgagaaacatactgagaggatacgattcggttggttgggaagagc

SEQ ID NO: 92 - DNA, 959 bp, synthetic construct
  misc_feature 1..959: note = DNA standard
  source 1..959: mol_type = other DNA
gctcttcctttctcgcatatgcgctcatttaattatgctcacggcgtagtttgttattattctattcccttgagaatccttatttctctttgaatcaccatctattttagtaactctatgtcacacttttcttttgccggatgggttagatatctccatgaaggaatgggccgatgtctaccttcctttaccgttgacgtacgcacagacgttccttcttctctcttccttctgcaacacagaatttacaagtgtaccctcctctttttttcctttttccgctaccatgcatttctttttccttcttcttttttttcacaaaatctttgtgatattttaggacagtattaatatgtaatacgttctttaagggacatataaatttactaacacccctaatatgtgaatgaatttattagatagaatttgtaattcatttagatataaagtgataattattagacacagttacggaatttctagcatcacgacagaaactcctcataggctctactactataaatacggcgttccacttcatacttatattatattcatatactgatcaatagtacttaaccataaatagatggtaccaatataaactaaattactaaatagtacttttaggtagtaatggagtatgttaagatcacattatattttgtttcagagactctatttctggtaattgccttattggtatcaaggtaggggaataagcgaccacggagaaagctagaaacaacaattgcggcgtgggtccagtgatgcggataccagctagagtaagttgaaattggcacatgaatgtattcttgaaatcagtgaaagacgttacgaaggtgggccaataatatatgagaggccttcaatccaaaaagcgtaccttactaatcacaaatttttgatattgagaaacatactgagaggatacgattcggttggttgggaagagc

SEQ ID NO: 93 - DNA, 994 bp, synthetic construct
  misc_feature 1..994: note = DNA standard
  source 1..994: mol_type = other DNA
gctcttctaccccctttttttttgtcttaggcttcgtagtttacatattagattgcctttggttgatttacatatttaatataatttggctatccagcttgtaatcgatttacaagttgacggaacgtacgaataaacaaagaagatatcaatggttgccaggacttatttctttagataatgatatattgttattcagagattgtggtatcacaacaccaaacaccacaaccgcttaaacaaaaccgtcgaggagtgaatacaccgaaaaacaaaaccctcaccataaatgaacacaaactcactcaaaggcgcaatctaatcaataaaccgattaaaaagtgtgaacttgtgcgtatttagataagtttgaggtatcttgttttaggaaattgagccaggatcaaactgtacgatttcacttaaaggttaagacgggagttaaggaatttggcggggagacaccctaatgagatacgacttctttatactaaattacctaccggaacgaatataaaacaggaagaacctctagggaaaaaagaaggacagcttgtgtaagggggaaaaaaatcctgccgcttcctctttcctttccgtctgcctcctcgccttctcctttccctcgttcccccgttctctccctgtctccttgtcgtccccctctccttcctctgtcttcgtttcccccccgccccagacgacgacgggctcaatatgtgcacgaagccggaagcaaaagctcgcgcgaggtctttgcaaattgatatttcggtcgtattgctggtggcctgttcgggcgacttcttaaggaagaacttagtgatgtccagtagccagggtatcagccggcgctgggaggctgggggggacgggagataaactttaggcatgtcagtggaccaggtgggaccacaggacagggtcaagcatggggcgtcggagtggccctccccccgtgtcacgcagtgacctttaggcggggtggaagagc

SEQ ID NO: 94 - DNA, 994 bp, synthetic construct
  misc_feature 1..994: note = DNA standard
  source 1..994: mol_type = other DNA
gctcttctaccccctttttttttgtcttaggcttcgtagtttacatattagattgcctttggttgatttacatatttaatataatttggctatccagcttgtaatcgatttacaagttgacggaacgtacgaataaacaaagaagatatcaatggttgccaggacttatttctttagataatgatatattgttattcagagattgtggttatataaataaacacaccaccaaacaccacaaccgcttaaacaaaaccgtcgaggagtgaatacaccgaaaaacaaaaccctcaccataaatgaacacaaactcactcaaaggcgcaatctaatcaataaaccgattaaaaagtgtgaacttgtgcgtatttagataagtttgaggtatcttgttttaggaaattgagccaggatcaaactgtacgatttcacttaaaggttaagacgggagttaaggaatttggcggggaaacaccctaatgagatacgacttctttatactaaattacctaccggaacgaatataaaacaggaagaacctctagggaaaaaagaaggacagcttgtgtaagggggaaaaaaaatcctgccgctttccgtctgcctcctcgccttctcctttccctcgttcccccgttctctccctgtctccttgtcgtccccctctccttcctctgtcttcgtttcccccccgccccagacgacgacgggctcaatatgtgcacgaagccggaagcaaaagctcgcgcgaggtctttgcaaattgatatttcggtcgtattgctgatggcctgttcgggcgacttcttaaggaagaacttagtgatgtccagtagccagggtatcagccggcgctgggaggctgggggggacgggagataaactttaggcatgtcagtggaccaggtgggaccacaggacagggtcaagcatggggcgtcggagtggccctccccccgtgtcacgcagtgacctttaggcggggtggaagagc

SEQ ID NO: 95 - DNA, 1141 bp, synthetic construct
  misc_feature 1..1141: note = DNA standard
  source 1..1141: mol_type = other DNA
gctcttccggctatgttgtcgcgagcaacaggcgaatcgaaaagggggcccagaatcaaacgaaacctcttcggttgaaaaacactcggggcgcaagtccagagggcagcatcgagccgccaacccatcttcaccacattggtgcgtgggtagttatggcaccatttcctgagaccgacccttcccgttgtagagcgaataaaccgtgtattgaatttgcactatgacatctccgcctatggttttgaaacccagcttggtcgctgatgtagtaatttgacgagcgtagacttagaaatgcattagcgccagtgttggaatacctcagaccctagtcggaactttgggtagcagggctgagggtgggaaacggctcatgtggaacgcacttggtctgaatagaagggtaaaaaggcgtatgactacaaaaatccgtctccatgcacacacaatcgttaatcccatcgtatccagggttccgaagaggaaccgacaggtataacctctgatatcccggatgatacgatagagacagcgtgagctgcgtttgcacgtcgctaacgctcaaaacttaaaaatattgagatcagcgaagggaacttcaaaattaacttgtagaaaaaaaaaaagcgaaagttttataaattaggaaggaagaataataatatagctaaaattctttgaggatacggatcattgggctacaagccaatgtctttgaataataagctaaccctatgcaattaccgaggtatacagcaagcgataaccagttttgccgaaaccaattaattcgagactgggagacagaaagaaggtgatcgaaaacgaataaccctgacgctcacgggcatagacagcgtatgaatccctccatttcccttcggcacccaaccctatcccttcgcctcccgatcaccaactaccttgttgcttccaccaaacgtacagcctgtcccatatcctccttttttccttaagccgggtactttcccacatccctgctcctctcccccgcctgccttgtaagcttgcccgttacttaccagcccatctgcttactcacgcgccccaccgacgtccggttttggtccacaattaatgccaagctgtactttaggagcgccctttggcgaagagc

SEQ ID NO: 96 - DNA, 1139 bp, synthetic construct
  misc_feature 1..1139: note = DNA standard
  source 1..1139: mol_type = other DNA
gctcttccggctatgttgtcgcgagcaacaggcgaatcgaaaagggggcccagaatcaaacgaaacctcttcggttgaaaaacactcggggcgcaagtccagagggcagcatcgagccgccaacccatcttcaccacattggtgcgtgggtagttatggcaccatttcctgagaccgacccttcccgttgtagagcgaataaaccgtatattgaatttgcactatgacatctccgcctatggttttgaaacccagcttggtcgctgatgtagtaatttgacgagcgtagacttagaaatgcattagcgccagtgttggaatacctcagaccctagtcggaactttgggtagcagggctgagggtgggaaacggctcatgtggaacgcacttggtctgaatagaagggtaaaaaggcgtatgactacaaaaatccgtctccatgcacacacaatcgttaatcccatcatatccagggttccgaagaggaaccgacaggtataacctctgatatcccggatgatacgatagagacagcgtgagctgcgtttgcacgtcgctaacgctcaaaacttaaaaatattgagatcagcgaagggaacttcaaaattaacttgtagaaaaaaaaaaagcgaaagttttataaattaggaaggaagaataataatttgaggatacagatcacgtcggtaataattgggctacaagccaatgtctttgaataataagctaaccctatgcaattaccgaggtatacagcaagcgataaccagttttgccgaaaccaattaattcgagacggggagacagaaagaaggtgatcgaaaacgaataaccctgacgctcacgggcatagacagcgtatgaatccctccatttcccttcggcacccaaccctatcccttcgcctcccgatcaccaactaccttgttgtttccaccaaacgtacagcctgtcccatatcctccttttttccttaagccgggtactttcccacatccctgctcctctcccccgcctgccttgtaagcttgcccgttacttaccagcccatctgcttactcacgcgccccaccgacgtccggttttggtccacaattaatgccaagctgtactttaggagcgccctttggcgaagagc

SEQ ID NO: 97 - DNA, 995 bp, synthetic construct
  misc_feature 1..995: note = DNA standard
  source 1..995: mol_type = other DNA
gctcttcttaagtccttatatttgacgaaattgtgttggtatagtaattgatattgtcctattttttagatcaatatctatttactgatgtaaatgaatatgttatatgagggtattagggggcagtataattgctgtcttacagataataagaactggaacaatttattaaatccatgatattcatgaagtgtgatatgcctacgaagaaataaaagagaagggaaatcgttgtagtagacctagcgtatacttgatccacccagcagtaaagtcaaatttaagtgtactttagtccaaaaaaaataaatctgagttatgacttcaaacattgatcttagtgttagaagcaggagtaacgacttatgtatctcatacacttccagattggtagtaagagagtttagtgttgagtttaatacctcgactggatattttctttttttcctgtttatctttttatggatgttccatgtgcccccgcgctaggacgagtatggggtcaatctcagctcgtgcacttttaagaggcaatactagattctagcctaattagaagaaatctctaaagacctaaactacattttactacatggatcatacagaacgaaacaccactccgacaaatggttaagccctttaaacgtattttgttctttattattaagaccacttatgacgcaaataagtagattgtaggatactgtttaaagcgctgaatgcgtacctaaaaaatacgcaggaagggtgagtgttaccctgttgatcatccatctaaaccgtaactatatctaggagcatcaagggaccaaaaacccgcggcgttgggaccaacggcggagagtagctactttctcctatctactccaggcggggttggcctcgctccacattcgcagaggcccgactacggttatatagacgcaactttcagcccaaaacctaacgagatatagaagatcgccactaggttaccgaattactcgttgaagagc

SEQ ID NO: 98 - DNA, 986 bp, synthetic construct
  misc_feature 1..986: note = DNA standard
  source 1..986: mol_type = other DNA
gctcttcttaagtccttatatttgacgaaattgtgttggtatagtaattgatattgtcctattttttagatcaatatctatttactgatgtaaatgaatatgttatatgagggtattagggggcagtataattgctgtcttacagataataagaactggaacaatttattaaatccatgatattcatgaagtgtgatatgcctacgaaaaataaaagagaagggaaatcgttgtagtagacctagcgtatacttgatccacccagcagtaaagtcaaatttaagtgtactttagtccaaaaaaaataaatctgagttatgacttcaaacattgatcttagtgttagaagcaggagtaacgacttatgtatctcatacacttccagattggtagtaagagagtttataataccttgactggatattttctttttttccttttttttctgtttatctttttatggatgttccatgtgcccccgcgctaggacgagtatggggtcaatctcagctcgtgcacttttaagaggcaatactagattctagcctaattagaagaaatctctaaagacctaaactacattttactacatagatcatacagaacgaaacaccactccgtaagccctttaaacgtattttgttctttattattaagaccacttatgacgcaaataagtagattgtaggatactgtttaaagcgctgaatgcgtacctaaaaaatacgcaggaagggtgagtgttaccctgttgatcatccatctaaaccgtaactaactatctaggagcatcaagggaccaaaaacccgcggcgttgggaccaacggcggagagtagctactttctcctatctactccaggcggggttggcctcgctccacattcgcagaggcccgactacggttatatagacgcaactttcagcccaaaacctaacgagatatagaagatcgccactaggttaccgaattactcgttgaagagc

SEQ ID NO: 99 - DNA, 973 bp, synthetic construct
  misc_feature 1..973: note = DNA standard
  source 1..973: mol_type = other DNA
gctcttcattgtgcgttgatgtcatttcgccgacctttactgtgggtgtagtattctgattatccttctctgaggaaaaacagactgaaacgttgtttaaatgtgacgcgggcccaacaaatcgcacaacagcagtactgtgtaatctgcgaggggactaaccaacacttatactttatgcgtacccacacacaggttttatctcaactgattcgcagatttcgtctgccagtttcaagggtctcgaaccggtccgcccatgttagaaaataatggaataaagaactggtaatcaaacattttctataatgggaaaagaataagtaacttttcccttttttctattaatgataagaagaagtatattgaataaaactacgcaacttcacacttttcctttaaaatatccatattattattagtcttatgcgaaagtgttgcatgttagaatgctcacaaaaagtgcaaacagctgctctcaagtaagcgcactaggatacactgggtaaactttgtggagttcgttcctctatggtgcataagccgaaatcaatgattttaacatctgttagattggaactggtcaaattagggtgcgtgtgcttataggaccccctgcctcatcttaacaatatcgcgattcatcgacagattttccatccgcagttctcgtaagggagatttcctcaaagtttttaaaggtgacgaatatcgagaaacaacgggactgggcttagacctccttgcgtttctcggggtaaaacgcacgtgaagatctctgaggagcaggctggcaagcccgctcgttactggaagggcagcgaatgtgaggagtcgtgggcagagtcccgctgggattgagaggcacgaaaaagggggccgagatcaaaagcgctaacttgagtcaaccgattactcgggcaatattgcgggtattcgtgagggtacgcggacgggagcagcagggaagagc

SEQ ID NO: 100 - DNA, 977 bp, synthetic construct
  misc_feature 1..977: note = DNA standard
  source 1..977: mol_type = other DNA
gctcttcattgtgcgttgatgtcatttcgccgacctttactgtgggtgtagtattctgattatccttctctgaggaaaaacagactgaaacgttgtttaaatgtgacgcgggcccaacaaatcgcacaacagcagtactgtgtaatctgcgaggggactaaccaacacttatactttatgcgtacccacacacaggttttatctcaattgattcgcagatttcgtctgccagtaagcaggtctctcgaaccggtccgcccgtgttagaaaataatggaataaagaactggtaatcaaacattttctatggaaaagaataagtaacttttcccttttttctattaatgataagaagaagtatattgaataaaactacgcaacttcacacttttcctttaaaatatccatattattattagtcttatgcgaaagtgttgcatgttagaatactcacaaaaagtgcaaacagctgctctcaagtaagcgcactaggatacactgggtaaactttgtggagttcgttcctctatggtgcataagccgaaatcaatgattttaacatctgttagattggaactggctaggattcaaattagggtgcgtgtgcttataggaccccctgcctcatcttaacaatatcgcgattcatcgacagattttccatccgcagttctcgtaagggagatttcctcaaagtttttaaaggtgacgaatatcgagaaacaacgggactgggcttagacctccttgcgtttctcggggtaaaacgtacgtgaagatctctgaggagcaggctggcaagcccgctcgttactggaagggcagcgaatgtgaggagtcgtgggcagagtcccgctgggattgagaggcacgaaaaagggggccgagatcaaaagcgctaacttgagtcaaccgattactcgggcaatattgcgggtattcgtgagggtacgcggacgggagcagcagggaagagc

SEQ ID NO: 101 - DNA, 1070 bp, synthetic construct
  misc_feature 1..1070: note = DNA standard
  source 1..1070: mol_type = other DNA
gctcttcgccgtcctccggtgcgccgtaccagggtaacgctgtctggtgtttagcaaattattacatctcactagaatttgctctataattgtatcggtactaccttatatttttcggtgtttttattctctatcactagggaactttaacgtacttgctctttcttaacttcctttaggacgcgctgcgctcgatagtgaatgatttttttttttgtttttttgatattttgttgtttttaagggttcatatgtcgtcttacagagtatagatgagatacgaactgtttcaagacctatgcattttttggaaacagaaacgctacgtttaatctcctatcacggaagatagtggacgtataagggacacgattagttctcacagccgcagcggatccttatgtgtcccccaatccatggcagtctactacaatatcttagcgggtcagcacgcttcttggtgggaccggcttaactcgcggttaatagttcctgggaccgacagacagttaaggctaaggaacaaattaagaaccgctttaatgctcgttaacttaaagcataaacgtactgttagtatattcatagtttcctaggaaagttctgcccattcgagtaactctcatgaaaacacaatttctaccaccaaatttattcgtgatatcatcaggacatgcctacgtagacgaagacacagcggagggttctagagccctcaaggaccagcttcaggtgattggaacgtgactagtactattagaagagaaactaaattaaagagttcggtgttagggacctgcacttaaaagataacaaattaaaaaagtataggtttacttaatccgcccgttgatctcttttttactatttaggattaacttaggacgctcaatcccccgttgtacccagccgtatcaccatgacttccgatctacttgctccgcaatttcgccaattgagtataattggctcgttcacttgaaagaagagttccgtcacacttatcgcatactcttgcgattcttctagtcatcttactaaagtctacttctcgacccatcccgaagagc

SEQ ID NO: 102 - DNA, 1075 bp, synthetic construct
  misc_feature 1..1075: note = DNA standard
  source 1..1075: mol_type = other DNA
gctcttcgccgtcctccggtgcgccgtaccagggtaacgctgtctggtgtttagcaaattattacatctcactagaatttgctctataattgtatcggtactaccttatatttttcggtgtttttattctctatcactagggaactttaacgtacttgctctttcttaacttcctttaggacgcgctgcgctcgatagtgaatgatttgttttttttgtttttttgatattttgttgtttttaagggttcatatgtcgtcttacagagtatagatgagatacgaactgtttcaagacctatgcattttttggaaacagaattacaaggctaagtaacgctacgtttaatctcctatcacggaagatagtggacgtataagggacacgattagttctcacagccacagcggatccttatgtgtcccccaatccatggcagtttactacaatatcttagcgggtcagcacgcttcttggtgggaccggcttaactcgcggttaatagttcctgggaccgacagacagttaaggctaaggaacaaattaagaaccgctttaatgctcgttaacttaaagcataaacgtactgttagtatattcatagtttcctaggaaggttctgcccattcgagtaactctcatgaaaacacaatttctaccaccaaatttattcgtgatatcatcaggacatgcctacgtagacgaagacacagcggagggttctagagccctcaaggaccagcttcaggtgactagtactattagaagagaaactaaattaaagagttcggtgttagggacctgcacttaaaagataacaaattaaaaaagtataggtttacttaatccgcccgttgatctctttttgactatttaggattaacttaggacgctcaatcccccgttgtacccagccgtatcaccatgacttccgatctacttgctccgcaatttcgccaattgagtataattggctcgttcacttgaaagaagagttccgtcacacttatcgcatactcttgcgattcttctagtcatcttactaaagtctacttctcgacccatcccgaagagc

SEQ ID NO: 103 - DNA, 1007 bp, synthetic construct
  misc_feature 1..1007: note = DNA standard
  source 1..1007: mol_type = other DNA
gctcttctttatagggaagacaaatttacataattataattaaacaattttgaatggtatgaattaggggcaaagcgaaccttatgaacattttccgcggtagtacgaaaacaaatagacccacataacggttgacacctgaaacgcaagggccttcgctccactcattcgcaacgtctgtggcgtagcattcgggttgccccccggtgcaaagagattataaaagatatcagacggattatagaagaggaaagaggagtcatctgacatgcggtgtgtgccaggggggaattctggaaaatgtagctatagagcaggacaaggctaagatgagtttgaacggtagactagaaaagaggtttaagaagataggcaaggtgtaattacgggagaggtagtaaaatggaaattagaagatccatagtaagggtagagtcgcggtggaatgattgtcgagagtgttgaagtcgaccgttttataacttattgactcccctacgcgctgttgtcgggttcttaccggccataccaagcaaagtgttttttagttatcaatttcatcgtgtgagatgcgtagacattttacctataatataacatcataataggtaaagtacgcacagacctactttcaatcacgcactggaaactggaacttttataagaaggtgctcgttagtgttttaataaaacaaaaaaataccttttcttagttaacgcgaattgctgatccaaatcccggacaagtctcaaattattgaccgcaggcaagcagacccccaaacgtagctttgcctaagcagcgtacagcattaatttcctctgcacacataagatgagagatcgacttaggcttcaaaccaaagacaattctttcctctaacgcaagtttagtataagattttgtatcaaatcgctattaaaatcgcttctagttgatctgcgaatagaaagtattaatataagtacattatctaacttattagattatctatgataagaagagc

SEQ ID NO: 104 - DNA, 1023 bp, synthetic construct
  misc_feature 1..1023: note = DNA standard
  source 1..1023: mol_type = other DNA
gctcttctttatagggaagacaaatttacataattataattaaacaattttgaatggtatgaattaggggcaaagcgaaccttatgaacattttccgcggtagtacgaaaacaaatagacccacataacggttgacacctgaaacgcaagggccttcgctccactcattcgcaacgtctgtggcgtagcattcgggttgccccccggcgcaaagcgattataaaagatatcagacggattatagaagaggaaagaggagtcatctgacatgcggtgtgtgccaggggggaattctggaaaatgtagctatagagcaggacaaggctaagatgagtttgaacggtagactagaaaagaggtttaagaagataggcaaggtgtaattacgcaggatattgataaactagagggggggagaggtagtaaaatggaaattagaagatccatagtaagggtagagtcgcggtggaatgattgtcgagagtgttgaagtcgaccgttttataacttattgactcccctacgcgctgttgccgggttcttaccggccataccaagcaaagtgttttttagttatcaatttcatcgtgtgagatgcgtagacattttacctataatataacatcataataggtaaagtacgcacagacctactttcaatcaactggaacttttataagaaggtgctcgttagtgttttaaataaaacaaaaaaataccttttcttagttaacgcgaattgctgatccaaatcccggacaagtctcaaattattgaccgcaggcaagcagacccccaaacgtagctttgcctaaacagcgtacagcattaatttcctctgcacacataagatgagagatcgacttaggcttcaaaccaaagacaattctttcctctaacgcaagtttagtataagattttgtatcaaatcgctattaaaatcgcttctagttgatctgcgaatagaaagtattaatataagtacattatctaacttattagattatctatgataagaagagc

SEQ ID NO: 105 - DNA, 1018 bp, synthetic construct
  misc_feature 1..1018: note = DNA standard
  source 1..1018: mol_type = other DNA
gctcttcgcgaaaacaccggtaaggcttgatccaatggtggctttgaacaatcggagagtgtgtgattctgaatatataagctaaggggttctgcgaggttagacggggtagacgacttaccgtgaacagcggtgccatcggtcgtttcaatttcattgagtttgcctatgtcaaactcagcaatttttaaaaaagcaaaaaaaaaatatttgagtccttaggggggtaaggttccagtctatttcgcgttaatggtatgggtgtgatcagaccatcactatataaatctccatgtcccaaacctcggatatagcatttagaaagactatttgcacagtagcgtgaaagctcataattcagtaacagcaattaatttattaattgttaaatctagacactggaaattgtgagtacttgtcgttgtccttgttagaaagaaggagtgtgtcctatgataaaatgaagatcaatgggaggataacgtacggattttttcgtatacagtgcatctatcactcaaaagctttcggacttttatgttaggtccatgtgcctcagtgtgtagtcagcacgctgccacaaatggactgcctcacatgctactatagatacaatatccctaaggccaaatagtagctatttgatccggcaagtagccttcaaagcatcctaaccagcaagcatcgacgcaatccgtcacttgtaaggcttcaggggctcatatagcaccaacgttgcgcaggaataaaaacataaccattctcatcctctatcgtgtaatccatcgtccatttatccgattcttcaaagggaaaaagcactgcattcaattgtctcatcaacaaaatgacgaagtcctcaacttgtatattgcttatttaagagatcgtctgcgtattccgagcaattttttataggcctgatgtaagattaatgataagatagcacttttatgtatgtctaagtgtgttctgggggtcaaagagtactcagtttgttgaattaggggagaagagc

SEQ ID NO: 106 - DNA, 1043 bp, synthetic construct
  misc_feature 1..1043: note = DNA standard
  source 1..1043: mol_type = other DNA
gctcttcgcgaaaacaccggtaaggcttgatccaatggtggctttgaacaatcggagagtgtgtgattctgaatatataagctaaggggttctgcgaggttagacggggtagacgacttaccgtgaacagcggtgccatcggtcgtttcaatttcattgagtttgcctatgtcaaactcagcaatttttaaaaaagcaaaaaaaaaaaatttgactccttaggggggtaaggttccagtctatttcgcgttaatggtatgggtgtgatcagaccatcactatataaatctccatgtcccaaacctcggatatagcatttagaaagactatttgcacagtagcgtgaaagctcataattcagtaacagcaattaatttattaattgttaaatctagacacgggaaattgtgagtacttgtcgttgtccttgttagaaagaaggagtgtgtcctatgataaaatgaagatcaatgggaggataacgtacggattttttcgtatacagtgcatctatcacctaaggtaattgtcctaaacacataagttgactcaaaagccttcggacttttatgttaggtccatgtgcctcagtgagcacgctgccacaaatggactgcctcacatgctactatagatacaatatccctaaggccaaatagtagctatttgatccggcaagtagccttcaaagcatcctaaccagcaagcatcgacgcaatccgtcacttgtaaggcttcaggggctcatatagcaccaacgttgcgcaggaataaaaacataaccattctcatcctctatcgtgtaatccatcgtccatttatccgattcttcaaaaggaaaaagcactgcattcaattgtctcatcaacaaaatgacgaagtcctcaacttgtatattgcttatttaagagatcgtctgcgtattccgagcaattttttataggcctgatgtaagattaatgataagatagcacttttatgtatgtctaagtgtgttctgggggtcaaagagtactcagtttgttgaattaggggagaagagc

SEQ ID NO: 107 - DNA, 1053 bp, synthetic construct
  misc_feature 1..1053: note = DNA standard
  source 1..1053: mol_type = other DNA
gctcttcaattctaggcacgaacatacaagatgaagtcatcctgcctaattttaatggtataggaaaaaattttaataacttatgcaattaaacataattactttttaaggtcgatataggttttttttcagtacttttttggtttggtttaggataagggtattttccttatcggatagaggaattattgttattgacagggagttgaatagaagtccacgctttagacgctaatgctggaacatgactaccgtactacacaaatcgttaaactgttaattggaaactttagctacaacttatatgtaatttgcctatcttatcgtattgttaactaaagtatagtactcaatggctttctgattaatgtcacttattggtttgcaattcagtcaatcatcttatgaactttttagactacgctcgtaggcaattccagttggaataagataactcgcatacaaaataaaatattagatctgcgctaactggatagaaatactagtataaatagtattgtgaataaatatgatgtaataaaagtaagaatatgtaatatttatcaactataaatggtcgtgggcaatgttcgtttaaatattaatttaaataaaatatatttattattaaaatttttaatattttaagtgtgttaaaatcaagcagcccaataataatactccattgtctagcaaattaaagatgtgcaggtagtgtaataatcgggctgatggggtgcttttaggtgtagttggaattacgtaattgaaaaaaatgttcacttcaacgtatgaaggacgttgaaactagtaagataggctggccatgctgccgacacgaatacgagagcgagaggcatccagatggagagcggcgtgaagaagcgagaggaagaagcggatgcctgaacaactcatgtcacgatctattcatccattctgcgtataagcaatcatgaagatttgaggcattactcatggatattgtcgtttttgcgaggtatttagtgcgcccataagcaagttaatttcagaagatgctataggaagagc

SEQ ID NO: 108 - DNA, 1041 bp, synthetic construct
  misc_feature 1..1041: note = DNA standard
  source 1..1041: mol_type = other DNA
gctcttcaattctaggcacgaacatacaagatgaagtcatcctgcctaattttaatggtataggaaaaaattttaataacttatgcaattaaacataattactttttaaggtcgatataggttttttttcagtacttttttggtttggtttaggataagggtattttccttatcggatagaggaattattgttattgacagggagttaaatagaagtccacgctctagacgctaatgctggaacatgactaccgtactacacaaatcgttaaactgttaattggaaactttagctacaacttatatgtaatttgcctatcttatcgtattgttaactaaagtatagtactcaatggctttctgattaatgtcacttattggttagcaattcagtcaatcatcttatgaactttttagactacgctcgtaggcaattccagttggaataagataactcgcatacaaaataaaatattagatctgcgctaactggatagaaatactaatgatgtaataaaagtaagaatatgtaatatttatcaactataaatggtcgtgggcaatgttcttaaatattaatttaaataaaatatatttattattaaaatttttaatattttaagtgtgttaaaatcaagcagcccaataataatactccattgtctagcaaattaaagatgtgcaggtagtgtaataatcggtgctggggttagttgctgatggggtgcttttaggtgtagttggaattacgtaattgaaaaaaatgttcacttcaacgtatgaaggacgttgaaactagtaagataggctggccatgctgccgacacgaatacaagagcgagaggcatccagatggagagcggcgtgaagaagcgagaggaagaagcggatgcctgaacaactcatgtcacgatctattcatccattctgcgtataagcaatcatgaagatttgaggcattactcatggatattgtcgtttttgcgaggtatttagtgcgcccataagcaagttaatttcagaagatgctataggaagagc

SEQ ID NO: 109 - DNA, 1008 bp, synthetic construct
  misc_feature 1..1008: note = DNA standard
  source 1..1008: mol_type = other DNA
gctcttctgagccttattctttctgatgtgttgtaagatcctaccaccttgaatcatacacggccgtgctcgtcgtttaacagaaggtgagccacttcgtagttaaccgtattgttcggcgaacctgataaggaatttaaatctgcccgtccaagaagtctccttgagtcgtaacggctcgagcgagcatctttcgagctcgcatgtaattcggtgcttgatgtgaggagaggtcaatcttgggtctggagcctcgtgccatccgtacggacacgcggtactctagagggtcagacgagtagacgaaacgcgtggcggagggtccctgagtcgcctggaagacaaccgcctcacctatgcggcgaactcgagggcagtatacaactggaacaaacaagaaaagaagaaaaaagaagtgaaggtttgaccaagccaaattgaaagtgcgtcctagatcaatgtcttacccgtgaaatgcgagaccacacaaagcactaatttccacaccgataggtaccgttaagcgccgatcttacacctcatccttacaggaaacaacacgatgcaaattctggtcctgcgtagcttgctccgggtctgcaattacaccacctctctactcggagcgtcaagtcgtaccgccctggtggctacgaggtgagcaatccctgcgaatagtcgtcttcctcgtagtctactaagagaatattcttatgtttcgcctacagacttccatcttctctaatctttgtacattactgtcattctcccactaggatagatagcttatcgcaacaagtccagctagtaaactaataaggcaggtgagatcggacgtcttcagcaaggcactaagaatcagctgggtggaagttaatcaacggggcttctatgggttatcaccacactgttatgttagcccggtaggtctagtgggatatgtggcgggcgaggaagctttactgagctgaccacaatcacagagcgtatcaacattcactgaagagc

SEQ ID NO: 110 - DNA, 987 bp, synthetic construct
  misc_feature 1..987: note = DNA standard
  source 1..987: mol_type = other DNA
gctcttctgagccttattctttctgatgtgttgtaagatcctaccaccttgaatcatacacggccgtgctcgtcgtttaacagaaggtgagccacttcgtagttaaccgtattgttcggcgaacctgataaggaatttaaatctgcccgtccaagaagtctccttgagtcgtaacggctcgagcgagcatctttcgagctcgcatgtgattcggtgcttgatgtgaggagaggtcaatcttgggtctggagcctcgtgccatccgtacggacacgcggtactctagagggtcagacgagtagacgaaacgcgtggcggagggtccctgagtaggcgcacacggacctcgcctggaagacaaccgcctcacctatgcggcgaactcgagggcagtatacaactggaacaaacaagaaaagaagaaaaaagaagtgaaggtttgaccaagccaaattgaaagtgcgtcctagatcaatgtcttacccgtgaaatgcgagaccacacaaagcactaatttccacaccgatagataccgttaagcgccgatcttacacctcatccttacaggaaacaacacgatgcaaattctggtcctgcgtagcttgctccgggtctgcaattacaccacctctctactcggagcgtcaagtcgtaccgccctggtgttcctcgtagtctactaagagaatattcttatgtttcgcctacagatttccatcttctctaattgtacattactgtcattctcccactaggatagatagcttatcgcaacaagtgcagctagtaaactaataaggcaggtgagatcggacgtcttcagcaaggcactaagaatcagctgggtggaagttaatcaacggggcttctatgggttatcaccacactgttatgttagcccggtaggtctagtgggatatgtggcgggcgaggaagctttactgagctgaccacaatcacagagcgtatcaacattcactgaagagc

SEQ ID NO: 111 - DNA, 958 bp, synthetic construct
  misc_feature 1..958: note = DNA standard
  source 1..958: mol_type = other DNA
gctcttccattataagactgtagactcctctctcaatgtagtcctttaatgaattaaaaattaagaatgatttgtatagttatttggaaaaggaggaggtgaaccgttatgcatttacggacaaacacaaaagaataactcggactcatactcttttctggtgcagctgtttgacttgctgtcttcggctggtcactttctcactcagtaacgccagccgcagaaactttgatattactgtagagacctctatcactactgagatagatgtggctgccagagacacgttgttcaaacctatatacaagtctgaaatttatggttattcgttaaaaaattatttctaataggcttaattttattatttagattagaggggaaccccaagctaagagccgtccggcgactctggcgctctttggctggcccattaacgtcccgacatccaccgaaatgcacacgtccatccgtcccagacgacggctagcgatggcacgtgcgagatacgtcaacggaccacacggattggatatccaggaaggtctctctccataaactcagaaaaaaattacactgtatttgctgccggactggatcatacggatctcccagagcgccagacatatttttggactttgccaaccctcacaagtcaactacgagcgactcttcgagttctcaaagcaacaaaataaatgcgcaggactgttacacggcagtccccaccccctccgggtctcatgcgtcgaagaattatgagcgctgcactgagacatcgaaacccggatctatgacttgctaccaccaagtcagttagtacgaacccgcaacgggacacggaatgtctaaggtaagagatagtatggagaaagtaagaactatactcatcccaaagggataggagcaaattaaccagcctccataacaccgtgtactaaccgccccctcattgaagagc

SEQ ID NO: 112 - DNA, 969 bp, synthetic construct
  misc_feature 1..969: note = DNA standard
  source 1..969: mol_type = other DNA
gctcttccattataagactgtagactcctctctcaatgtagtcctttaatgaattaaaaattaagaatgatttgtatagttatttggaaaaggaggaggtgaaccgttatgcatttacggacaaacacaaaagaataactcggactcatactcttttctggtgcagctgtttgacttgctgtcttcggctggtcactttctcactcattaacgccagccgcagaaactttgatattactgtagagacctctatcactactgagatagatgtggctgccagagacacgttgttcaaacctatatacaagtctgaaatttatggttattcgttaaaaaattatttctaataggcttaattttattatgatagtatttaaattttattttacgtagtttttttagattagaggggaacgcccaagctaagagccgtccggcgactctggcgctctttggctggcccattaacgtcccgacatccaccgaaatgcacacgtccatctgtccctgcgagatacgtcaacggaccacacggattggatatccaggaaggtctctctccataaactcagaaaaaaattacactgtatttgctgccggactggatcatacggatctcccagagcgccagacatatttttggactttgccaaccctcgcaagtcaactacgagcgactcttcgagttctcaaagcaacaaaataaatgcgcaggactgttacacggcagtccccaccccctccgggtctcatgcgtcgaaaaattatgagcgctgcactgagacatcgaaacccggatctatgacttgctaccaccaagtcagttagtacgaacccgcaacgggacacggaatgtctaaggtaagagatagtatggagaaagtaagaactatactcatcccaaagggataggagcaaattaaccagcctccataacaccgtgtactaaccgccccctcattgaagagc

SEQ ID NO: 113 - DNA, 807 bp, synthetic construct
  misc_feature 1..807: note = DNA standard
  source 1..807: mol_type = other DNA
gctcttctatacaacaggaccagcgtccggcaaaaggcgtaaccggaaccggctgagaaaaatcatcggttgaataaggtagaattgtataataagtcgtaaggttaaacaacgctaattaacaaaaagacaagcccaacacagccatcaggcaacggctctagtggaagttgaaggtataatgagatagctgtcgttgcaagtaagaattcacttgtttgcatattccagtaaacaaggtccttctgaattaattttcttgccgtcgtgtttaagcgtcgactccgtattgatgggaactagtcaatgtacacggccgttgtaagatgttaacccattcctgaaaagggccaggggaatgatagcaggcaatacatggcacacgatagaagtctgcttgatgcttggtctctgctgacctttacagtctgccagctgagaactttgttattaagtgttagcgatcttgtatacgcccgtataagaggttgacaatgcgtgcggaaacgacgctagacggtttgatggcgggtcgtaacggcctcattttccaccattactgtgacatttctttttattgatttgactcttccattgtcgtctaatcataagtcgaatcagtttcgagagcttcctgtcgaaagtttttctgtagtacccctaactgtgcgtcactaaagcttcgtactttatactgtatcactgattgaacctactcgctctcgtatttttttcacatgtcgtgagtataattaatattaaactaaatcaattttattaaatttcatgccaagatatacgaagagc

SEQ ID NO: 114 - DNA, 797 bp, synthetic construct
  misc_feature 1..797: note = DNA standard
  source 1..797: mol_type = other DNA
gctcttctatacaacaggaccagcgtccggcaaaaggcgtaaccggaaccggctgagaaaaatcatcggttgaataaggtagaattgtataataagtcgtaaggttaaacaacgctaattaacaaaaagacaagcccaacacagccatcaggcaacggctctagtggaagttgaaggtataatgagatagctgtcgttgcaagtaagatcacttgtttgcatattccagtaaacaaggtccttctgaattaattttcttgccgtcgtgttattaagcgtcgactccgtattgatgggaactagtcaatgtacacggccgttgtaagatgttaacccatctcctaaaaagggccaggggaatgatagcaggcaatacatggcacacgatagaagtctgcttgatgcttggtctctgctgacctttacagtctgccagctgagaactttgttattaagtgttagcgatcttgtatacgcgttgacaatgcgtgcggaaacgacgctagacggtttgatggcgggtcgtaacggcctcattttccaccattactgtgacatttctttttattgatttgactcttccattgtcatctaatcataagtcgaatcagtttcgagagcttcctgtcgaaagtttttctgtagtacccctaactgtgcgtcactaaagcttcgtactttatactgtatcactgattgaacctactcgctctcgtatttttttcacatgtcgtgagtataattaatattaaactaaatcaattttattaaatttcatgccaagatatacgaagagc

SEQ ID NO: 115 - DNA, 1043 bp, synthetic construct
  misc_feature 1..1043: note = DNA standard
  source 1..1043: mol_type = other DNA
gctcttctgttagggtaatggcaacactggacctccaaaactgagcctattataagtcttaatttagtagaattatgctcatttataaccgcgtcaagtcttcaaagattatataaacgtgggtagtgctattccgttcatataccctactccttgtaacaactattcataattactccttggtctaatattattaattgaaaaaagcaatacagtctatctactccgctcccggatacatatgctgctgagaggggtgcacctcatggtaatcaaaatcaagtttggtgttgttaagttatttttgtattggcgtcgtgggtgttccccctgtgtgtttcggattataggcgttgggacggtaacaccgctctctttcgcctacagaggatccgaaattcgtttcgtagcaatgcgtactccagctcacccatagtctgcacgaagacagatagaaatattggaggttggatgcctctctgaggggacttgctcactttgtggccaaggcgcatataggtaaaagttcggtagttgtttgcatccgtaagggcagcagataaatagcatcttgggaacatgcgaaaccaagtacctgccggtacgcacgtttaacgaattgaggtcttgcctgtggggtaaaaaaaatgttccttcagtttatagattgcctaaaagattcctagattgcttaatttgcttaagtaatactccttatcacagctagtatttcgtccacgttactattataaccgttccatcttgtagagctttttcttcactcctttgaattaatagtatttgtaatactattacattcgaatcgccgtaattatggaatcttacggcatcatataagggcagtttaaaagagattgggtatattacttcttcacgctcaacacataaaactaagactagagagtcgactgaaccgtaaataggatttattgcttactctgtatataggctgggcattttgattttacattctgctcgcaaacggctttatacttaatccttagtccataaagcggaagagc

SEQ ID NO: 116 - DNA, 1059 bp, synthetic construct
  misc_feature 1..1059: note = DNA standard
  source 1..1059: mol_type = other DNA
gctcttctgttagggtaatggcaacactggacctccaaaactgagcctattataagtcttaatttagtagaattatgctcatttataaccgcgtcaagtcttcaaagattatataaacgtgggtagtgctattccgttcatataccctactccttgtaacaactattcataattactccttggtctaatattattaattgaaaaaagaaatacagctccgctcccggatacatatgctgctgagaggggtgcacctcatggtaatcaaaatcaagtttggtgttgtagttaagttatttttgtattggcgtcgtgggtgttccccctgtgtgtttcggattataggcgttgggacggtaacaccgctctctttcgcctacagaggatccgaaattcgtttcgtagcaatgcgtactccagctcacccatagtctgcgaagacagatagaaatattggaggttggatgcctctctgaggggacttgctcactttgtggccaaggcgcatataggtaaaagttcggtagttgtttgcatccgtaagggcagcagataaatagtatcttgggaacatgcgaaaccaagtacctgccggtacgcacgtttaacgaattgaggtcttgcctgtggggtaaaaaaaatgttccttcagtttatagattgcctaaaagattcctagattgcttaatttgcttaagtaatactccttatcacagctagtatttccctactcgttgtaatactgatgtgtccacgttactattataaccgttccatcttgtagagctttttcttcactcctttgaattaatagtatttgtaatactattacattcgaatcgccgtaattacggaatcttacggcatcatataagggcagtttaaaagagattgggtatattacttcttcacgctcaacacataaaactaagactagagagtcgactgaaccgtaaataggatttattgcttactctgtatataggctgggcattttgattttacattctgctcgcaaacggctttatacttaatccttagtccataaagcggaagagc

SEQ ID NO: 117 - DNA, 1123 bp, synthetic construct
  misc_feature 1..1123: note = DNA standard
  source 1..1123: mol_type = other DNA
gctcttcttccgctaatcttacgaatttatagaaggtaggaaccgattataaatttacgaaacaatttgaccagtactacagctctgccgactaagtgtaattaataaacacaattacgctatatctacgtcaagaatcctagattttgggtaacgtgcgtccagatagcttggttcgcacaaaaataaattctgcacgtctatttctgtgtggattcttcttaaggagaccaatcgtcttgaatttggaacagtcttacttgcactgtattagcactagtcttttaatcttgtaggtgcgctataaaagccctgccataaaactaacattgtaagacaacatgatatagatgtctccatatatctctcaccgtgtgtcttagttatttccctcccaaagtacattaattagaaagaacgtgtgtaagagttgtaatgatttccgtaagagccaaaatcgtgaaaaggatggttatggacattgagtaagaaagagtgaaattatgtgaagatggaccttttagctcggctccattcctatcgttttcttacaaacgttgccaagaagataactagagaagtgactaccaaacgatgtcagtgaggatacacgcttggaataaagtcacataagaaacatgaaaaagaagaatagctcatatttcgagtcaaaggggaatagaaaggctatcggaagaaagatgaggatgaactgcaagtagctggaatagacgtacgtagcataacacacgtagctaaatctcttaaatcgccgttttatttttatgatacgtgaagatacactgaagtaattaatagcctcgactgagtactcaatcatggaaacaagccagggtttgcataaggaaagccgtctttaacataaaagaggaaacgcgtactaaacaggtgttcgaatagtacaatttgcgctattgcattttggcggattccgttggggttattaatcgaacggagtgcctgcgtaaacccctcggtattgcaccaagtgatggtgggaaagagtgcaatagtacagtcatgaaggaaaccggaatcgctaaaatgaacgcactacactatttcttcttgaaggtgattcatagatatttagttgaagagc

SEQ ID NO: 118 - DNA, 1126 bp, synthetic construct
  misc_feature 1..1126: note = DNA standard
  source 1..1126: mol_type = other DNA
gctcttcttccgctaatcttacgaatttatagaaggtaggaaccgattataaatttacgaaacaatttgaccagtactacagctctgccgactaagtgtaattaataaacacaattacgctatatctacgtcaagaatcctagattttgggtaacgtgcgtccagatagcttggttcgcacaaaaataaattctgcacgtctatttcttggtgtggattcttcttaaggagaccaatcgtcttgaatttggaacagtcttacttgcactgtattagcactagtcttttaatcttgtaggtgcgctataaaagcccataaaactaacattgtaagacaacatgatatagatgtctccatatatctctcaccgtgtgtcttagttatttccctcccaaagtacattaattagaaagaacgtgtgtaagagttgtaatgatttccgtaagagccaaaatcgtgaaaaggatggttatggaaagagtgaaattatgtgaagatggaccttttggctcggctccattcctatcgttttcttacaaacgttgccaagaagataactagagaagtgactaccaaacgatgtcagtgaggatacacgcttggaataaagtcacataagaaacatgaaaaagaagaatagctcatatttcgagtcaaaggggaatagaaaggctatcggaagaaagatgaggatgaacaattatagggggctgcctgcaagtagctggaatagacgtacgtagcataacacacgtagctaaatctcttaaatcgccgttttatttttatgatacgtgaagatacactgaactaattaatagcctcgactgagtactcaatcatggaaacaagccagggtttgcataaggaaagccgtctttaacataaaagaggaaacgcgtactaaacaggtgttcaaatagtacaatttgcgctattgcattttggcggattccgttggggttattaatcgaacggagtgcctgcgtaaacccctcggtattgcaccaagtgatggtgggaaagagtgcaatagtacagtcatgaaggaaaccggaatcgctaaaatgaacgcactacactatttcttcttgaaggtgattcatagatatttagttgaagagc

SEQ ID NO: 119 - DNA, 1154 bp, synthetic construct
  misc_feature 1..1154: note = DNA standard
  source 1..1154: mol_type = other DNA
gctcttcatgaaattaaaactattaaggaatataaagccatctacttgattagtcgaaaatacacaacataacattgaaaaaaaaacccttcaaaaaagtgtttcaaaccatacaaattactaatcatgatgaaacgcaaacactaaattcaacatgaattaatttactcttagaaaacatccgagttgagacgaagaataggataaagttggtgtttgttgtgggatcctgtggcccgggaatatccgaatgcagacgaagacaacgactgagtaaggtgaggtatgcgtgtggtttctttacttaatgtattctggtcgtttgtgacgtatgtacttaaagaaccatattagcgttacattgaatagcgctctttggatggtagcaggtttttgtaggttacttgttgtctttggtaatatcattctaataatttttgtgatgaaatttattttcgctatatggcaactaaggaataatttcacctacctttctccaatactacatcacgtgatgggcgtgcataaaagatgccccttgtgggtgtttgcagtgagaattgtagccggaggaaggagaggagtataaaggtgtgggctaagaaagaaattgagcaaacgactggcactgcttaatgtttcattcggaggtggttacacaatcacccatcattatttatgcgtaacaaacgtgcgacttgttcgatttattgacgacatttctgcctcgcacaataaacgagggacgatcctataaatacaatccgtttctgtgtactttcaagacaagaaatactagtaaagagtaatatataagacgtgaattgtagtcaaacttcattttggcgattatgatcttacctgacctggcaacaaacaacatattggggcaatgatgctaaagaaggagaccgtatcgtactacaagtatcgcgaggagttaagtattgtatacataaaaagataattaaagttgtacttaatatatcttaatatgaattggtagctgacgtcagacgattaaggattttgacacgatttttataggaatattaggtaaagttccttcttattttggaaaatattacgactatgccaatgtacaaaaattaaagtcatttgtattatcgttatggaattctatgaagaagagc

SEQ ID NO: 120 - DNA, 1159 bp, synthetic construct
  misc_feature 1..1159: note = DNA standard
  source 1..1159: mol_type = other DNA
gctcttcatgaaattaaaactattaaggaatataaagccatctacttgattagtcgaaaatacacaacataacattgaaaaaaaaacccttcaaaaaagtgtttcaaaccatacaaattactaatcatgatgaaacgcaaacactaaattcaacatgaattaatttactcttagaaaacatccgagttgagacgaagaataggataaatggtgtttgttgtgggatcctgtggcccgggaatatccgaatgcagacgaagacaacgactgagtaaggtgaggtatgcgtgtggtttctttacttaatgtattctggtcgtttgtgacgtatgtacttaaagaaccatattagcgttacattgaatagcgctctttggatggtagcaggtttttgtgttctggaaagttttttctaaggttacttgttgtctttggtaatatcattctaataatttttgtgatgaaatttattttcgctatatggcaactaaggaataatttcacctacctttctccaatactacatcacgtgatgggcgtgcataaaagatgccccttgtgggtgtttgcagtgaaaattggaaggagaggagtataaaggtgtgggctaagaaagaaattgagcaaacgactggcactgcttaatgtttcattcggaggtggttacacaatcacccatcattatttatgcgtaacaaacgtgcgacttgttcgatttattgacgacatttctgcctcgcacaataaacgagggacgatcctataaatacaattcgtttctgtgtactttcaagacaagaaatactagtagtaatatataagacgtgaattgtagtcaaacttcattttggcgattatgatcttacctgacctggcaacaaacaacatattggggcaatgatgctaaagaaggagaccgtatcgtactacaagtatcgcgaggagttaagtgttgtatacataaaaagataattaaagttgtacttaatatatcttaatatgaattggtagctgacgtcagacgattaaggattttgacacgatttttataggaatattaggtaaagttccttcttattttggaaaatattacgactatgccaatgtacaaaaattaaagtcatttgtattatcgttatggaattctatgaagaagagc

SEQ ID NO: 121 - DNA, 1093 bp, synthetic construct
  misc_feature 1..1093: note = DNA standard
  source 1..1093: mol_type = other DNA
gctcttctgatcttaagaagttattagatagggcactgtaaattctaggctaaaaattttcccctcctcgcaacctaaccaatatagggctcaaaaagaaacggaacatgaaatttgagtcaaaatggaaattaatgcatgctgtgcaaagtaataagggatatgaaacaacgtactatacctcacgagaaccggaatagtcagcgcaagcagcgcggcaggagtgcaagttgaacggacgccttactaccacgggaaacgatttcatgatacttagaattaggcatggagaagtatacttcataagggtaattccaatgtctggaacgacttgtttcagtaaatcaaatataacagcaatttatagtgtaaatttcgtaaggtataaaacgtaagatgaaatttccaaagccatctaaccaaccatttcacctgctaggtaatcccataaagaaaataagtacacaatagcaataacgcatcaattgtgaattcagtgcgaaggagaacagcagagaaaaacatcgttgtattacaaatcgaaataaagctttgaatttatccatcttagtcatcaacatttttagtgaaaattaatatattattaggtatttttgcagcgcgctccgacctacgtggctatggagtagttatggtttcggtaattgtcacaatcggacggacgcagctctgctgccatggaatgattaaccttgcctagccgacgaaacctgcctctataggaaggcgagggtctgggagagcggggaggtaagtaagtgtgctaaatattatcaatgatcatccaatcctcaacatccaacaaccaggtagcaataaagcgaaattcaatttgcattctatatgattctacattgagattattatagtacaaaaacgggggaatattggcgataaaaaaaaaagaagaaactataagttctaaggaatccaccatggtcaactgcttatctcagcgttttcataaagaggtgggacctataaaacatttcacggtaaaagaaataaacaatcatagggcagtcaacagcaaaaatagctacggtaagcgtgaataacaggcaggaagagc

SEQ ID NO: 122 - DNA, 1118 bp, synthetic construct
  misc_feature 1..1118: note = DNA standard
  source 1..1118: mol_type = other DNA
gctcttctgatcttaagaagttattagatagggcactgtaaattctaggctaaaaattttcccctcctcgcaacctaaccaatatagggctcaaaaagaaacggaacatgaaatttgagtcaaaatggaaattaatgcatgctgtgcaaagtaataagggatatgaaacaacgtactatacctcacgagaaccggaatagtcagcgctagcagcgcggcaggagtgcaagttgaacggacgccttactaccacgggaaacgatttcatgatacttagaattaggcatggagaagtatacttcataagggtaatttcaatgtctggaacgacttgtttcagtaaatcaaatataacagcaatttatagtgtaaatttcgtaaggtataaaacgtaagatgaaatttccaaagccatctaaccaaccatttcacctgctaggtaatcccataaagaaaataacacaatagcaataacgcatcaattgtgaattcagtgcgaaggagaacagcagagaaaaacatcgttgtattacttcttatatacttatttactacacgttatcacttaaaatcgaaataaagctttgaatttatccatcttagtcatcaacatttttagtgaaaattaatatattattaggtatttttgcagcgcgctccgacctacgtggctatggagtagttatggtttcggtaattgtcacaatcggacggacgcagctctactgccatggaatgattaaccttgcctagccgacgaaacctgcctctataggaaggcgagggtctgggagagcggggaggtaagtaagtgtgctaaatattatcaatgatcatccaatcctcaacatccaacaaccaggtagcaataaagcgaaattcaatttgcattctatatgattctgattatgatagtacaaaaacgggggaatattggcgataaaaaaaaaagaagaaactataagttctaaggaatccaccatggtcaactgcttatctcagcgttttcataaagaggtgggacctataaaacatttcacggtaaaagaaataaacaatcatagggcagtcaacagcaaaaatagctacggtaagcgtgaataacaggcaggaagagc

SEQ ID NO: 123 - DNA, 907 bp, synthetic construct
  misc_feature 1..907: note = DNA standard
  source 1..907: mol_type = other DNA
gctcttcgttgatgcagtccacggagacgagagtcaagaaaagtcgtgattcaatatctggaattttttggcttcttttttaactgccttccaggttttttcctcgcgtagaataaatcttacaaggcgtatactcttaatagccgtccaaattcatcctagttgcgaactcttggtaacctatttttgcttttttacagaaagagattgaccctttttcggtacaatttagcgaataggagctacgcacacacatgaaagggggtaaagtgcacttgtttattgtttaatagatctgtacctcatataacttgagatgctttgttgtgtttggggaggtgtttttatccggggcgcccggtctgggtggcgtcgttgtgggttgttggatattgccctagagtgaatgttcagccgaaagcaccgcgagtgatgagggcgctggtcgggcgtgtgaggtgtgggagggaggtggcacttaaatgaaagtttaaacactaggaaatatagtaggttattagaataaaacaaatatggtattggatagtatactttgtgttcttaaaaaagtctatggatatctgatttttgtttctagtgttttccttagttgacggattgaataataagaagacgccaatgctaggtaagctatagatagaagcttattcaacaagagtgacaaaaactcaggactgattatttaatttttttatattggggtaatttgttattgcccctactgcttgtggctaacgtagttacggtcctgagcctcagaaaactcctctcgcccaccctccccagtatcgtcattgcgtgcaactgcattgctccttcacccggggtcatcggaatccgctccccactggagcaccacctaaatccatgttaatttttgaagagc

SEQ ID NO: 124 - DNA, 919 bp, synthetic construct
  misc_feature 1..919: note = DNA standard
  source 1..919: mol_type = other DNA
gctcttcgttgatgcagtccacggagacgagagtcaagaaaagtcgtgattcaatatctggaattttttggcttcttttttaactgccttccaggttttttcctcgcgtagaataaatcttacaaggcgtatactcttaatagccgtccaaattcatcctagttgcgaactcttggtaacctatttttgcttttttacagaaagagagtgaccctttttcggtacattttagcgaataggagctacgcacacacatgaaagggggtaaagtgcacttgtttattgtttaatagatctgtacctcatataacttgagatgctttgttgtgtttggggaggtgtttttatccgtctgggtggcgtcgttgtgggttgttggatattgccctagagtgaatgttcagcctaaagcaccgcgagtgatgagggcgctggtcgggcgtgtgaggtgtgggagggaggtggcacttaaatgaaagtttaaacactaggaaatatagtaggttattagaataaaacataggtgatcttaatatgaaatatggtattggatagtatacgttgtgttcttaaaaaagtctatggatatctgatttttgtttctagtgttttccttagttgacggattgaataataagaagacgccaatgctaggtaagctatagatagaagcttattcaacaagagtgacaaaaactcaggactgattttatatttaatttttttatattggggtaatttgttattgcccctactgcttgtggctaacgtagttacggtcctgagcctcagaaaactcctctcgcccaccctccccagtatcgtcattgcgtgcaactgcattgctccttcacccggggtcatcggaatccgctccccactggagcaccacctaaatccatgttaatttttgaagagc

SEQ ID NO: 125 - DNA, 1089 bp, synthetic construct
  misc_feature 1..1089: note = DNA standard
  source 1..1089: mol_type = other DNA
gctcttctaattaatatttgtacattttatgttacggtccattattttgagggtctcttgtactccataatagttactcctatattcggttcctactatcagagtcacaactgtccgggtttgtcagatgaacatctctttttataataaaaaaatttttccagacatcggaaacccataagcttattcgtaaagtagaaaagtggaataacttttataatcttcgttttagtataccatagaactagtgtgaaactcataatattgtcatcacctattatacgtgtattttatacggtagggtagaggagtacactaataactctttatataaaacgaaaagggtgctattccccttcggttctgcgacatgtgttgctcagtagaccggggcatagaatcatatattcgttcatctcgtagatgaatgttaggtgttcgccggtgctaagtcgctctgcataagcttcagttcattgttaaatgttcgcagatggtgttcaacaactctaattatcttactccttttttatttataatctcaccccgctatctaaaaaaaagaggacagatatgacctgctttctattttcctaattcgaatagcttcctaatcgagtaattacaagaacaaactatcaaaccatactaacttcttacacttcaacaaatcttaatactttattttaatttttccaattctttcttacatccttctagtaccatgcattggccattctacttatttacaatacttccattatcacagaatttttactggtaattgtaagttgacaagaacatcaacctcatctattccaagtaatggatgctacaacccacaaattcgtataactagcgcctctagtccatttttttgtgcctagggttaatataacaaaggagtcaagcgtttggttcaagttctccattgtaaccatagattgtcaccgcaggtgtcacggggacgaggatatgatgaatcttaagttgttattggtttctcccacccatatcttcgtcgggtcaaccgtaggacacggattatctggagaacaggacaagcttagcgtcggaagatcgaagagc

SEQ ID NO: 126 - DNA, 1111 bp, synthetic construct
  misc_feature 1..1111: note = DNA standard
  source 1..1111: mol_type = other DNA
gctcttctaattaatatttgtacattttatgttacggtccattattttgagggtctcttgtactccataatagttactcctatattcggttcctactatcagagtcacaactgtccgggtttgtcagatgaacatctctttttataataaaaaaatttttccagacatcggaaacccataagcttattcgtaaagtagaaaagtggagtaacttttataatcttcgttttagtataccatagaactagtgtgaaactcataatattgtcatcacctattatacgtgtattttatacggtagggtagaggagtacactaataactctttatataaaacgaaaagggtgctattccccttcggttctgcgacatgtgttgctcagtagacccttaggtgccgggaaatctatgggacgggggcatagaatcatatattcgttcatctcgtggatgaatgttaggtgttcgccggtgctaagtcgctctgcataagcttcagttcattgttaaatgttcgcagatggtgttcaacaactctaattatcttactccttttattttatttataatctcaccccgctatttaaaaaaaagaggacagatatgacctgctttctattttcctaattcgaatagcttcctaatcgagtaattacaagaacaaactatcaaaccatactaacttcttacacttcaacaaatcttaatactttattttaatttttccaattctttcttacatccttctagtaccatgcattggccattctacaatacttccattatcacagaatttttactggtaattgtaagttgacaagaacatcaacctcatctattccaagtaatggatgctacaacccacaaattcgtataactagcgcctctagtccatttttttgtacctagggttaatataacaaaggagtcaagcgtttggttcaagttctccattgtaaccatagattgtcaccgcaggtgtcacggggacgaggatatgatgaatcttaagttgttattggtttctcccacccatatcttcgtcgggtcaaccgtaggacacggattatctggagaacaggacaagcttagcgtcggaagatcgaagagc

SEQ ID NO: 127 - DNA, 1021 bp, synthetic construct
  misc_feature 1..1021: note = DNA standard
  source 1..1021: mol_type = other DNA
gctcttctaaaaacacattcattcaagcattttacatagtttgaacttccttaatttgagaatcatgtacggtacaccctttgcgatgttgctataaaatgaccataactagtgattatatcaatcacataagaaaaggaaaccaaagcacggtggggagattgtaaatgtaatactttcaaacacgactctacatttattttagaattatacaaccaccctactttgctttagcctcacttcaagaagataggcaagaaataaaacgaaaaaacatgtacaacaaaataatagattaaaatatcggcttgggggtcgcgcaccgatggtttaatgatcatcatggcttagttgactggcttttttcggaatatggctctaatgaatgataggtactctggtttaattggatactacatcgatttattttcgtaggtataatctatcgggattagcagtcacgagtgttgagagtaattcccctaatctctcgccggcctgcattggcgcgctctattgtgtcggcatctttttgtgtttatgtgtgttaaaaatagccatattaacgcccaatatgaactgatcattggggctatctataaatatcctctagggcaattccttgtaaggtatttattaataatttttttatatataaattataaattttttaattaatatatatgctagtcgttatttataaatatttaatttttaataatatatttttaatattgactactgaccgctaatggaatcatttaggtacctaattaaattcatgaataacctaaggaataaaaaaattttaagggtagcttacctttgcttgcagtcccaactctttctgaactcaacaaagagccacagggaacccttgtcgtcttgttagttcgaccacactcggctgatcacttaattgttcggctagtccgtaacacctttgcgttatatctaggactgcacttcctcggtacagttcccctaaatccgggttaaggccctaaagtaccggaagagc

SEQ ID NO: 128 - DNA, 1041 bp, synthetic construct
  misc_feature 1..1041: note = DNA standard
  source 1..1041: mol_type = other DNA
gctcttctaaaaacacattcattcaagcattttacatagtttgaacttccttaatttgagaatcatgtacggtacaccctttgcgatgttgctataaaatgaccataactagtgattatatcaatcacataagaaaaggaaaccaaagcacggtggggagattgtaaatgtaatactttcaaacacgactctacatttattttagaattctatacaaccaccctactttgctttagcctcacttcaagaagataggcaagaaataaaacgaaaaaacatgtacaacaaaataatagattaaaatatcggcttgggggtcgcgcaccgatggtttaatgatcatcatggcttagttgactggcttttttcggaatatggctctaatgaatgataggtactctggtttaattggatactacatcgatttattttcgtaggtataatctatccgagtgttgagagtaattcccctagtctctcgggcctgcattggcgcgctctattgtgtcggcatctttttgtgtttatgtgtgttaaaaatagccatattaacgcccaatatgaactgatcattggggctatctatatatatcctctagggcaattccttgtaaggtatttattaataatttttttatatataaaaattataatattttttaaatataaaattttttttttataaattttttaattaatatatatgctagtcgttatttataaatatttaatttttaataatatatttttaatattgactactgaccgctaatggaatcatttaggtacctaattaaattcatgaataacctaaggaataaaaaaattttaagagtagcttacctttgcttgcagtcccaactctttctgaactcaacaaagagccacagggaacccttgtcgtcttgttagttcgaccacactcggctgatcacttaattgttcggctagtccgtaacacctttgcgttatatctaggactgcacttcctcggtacagttcccctaaatccgggttaaggccctaaagtaccggaagagc

SEQ ID NO: 129 - DNA, 957 bp, synthetic construct
  misc_feature 1..957: note = DNA standard
  source 1..957: mol_type = other DNA
gctcttcgagtctatcgtcggggggtcgatggtgcccaggctcagcgacacggtgttagcccctccatccctagtctcgacggcggtcattacgccgggcggacgacgtatccgaaccgaccaccaaaacccagatacgagccggcccccactccggctgttctgtcgttgtctcctcctgttcctgcctagcctcatcatccactccgtccacgtgtgtccgcctagaggttatccatacaaaggtgcgtgatcccgcagggaattcgactccaaactaaacaagaaaccattatactagagataaaatctaaaagattttgatttgtaatttttaaccttaattataataatataaattacgcgacaattgggtggtatatcggcatataaaagtgcacagaatgctgagagcggttagagataaggcagacgatgttggcggcgggtggcagacctaatactctcagaagctcagtaaagccactcgtaattataaatggttattttttatgactttagactgtaataaaatgcaatagacgatctaggaaataattaacatttttatagttttttaacttctctagaattattgggaaagatgtatcaaaagcttgattgtgtatagtttcgactttggaagattacgtgattctgggaaccacagcggagctcccgtgccttcgttcactgtggcatgcgtggtctcccacccgccttgcacccgtctccgcggcgatgggtaccgccgacatgacactcgctccagggtgggactcccgtacaacggcgacccatatacggctccccaggcgccgtgatgtacgcggtacgctccagagggaacacggacgccgcaccaccgctgacccgatcgctgcggagggagcaattaggtcgcgggggcctgcactgcccgcaactccgcgccagtacatcgtgtgcgcgaagagc

SEQ ID NO: 130 - DNA, 973 bp, synthetic construct
  misc_feature 1..973: note = DNA standard
  source 1..973: mol_type = other DNA
gctcttcgagtctatcgtcggggggtcgatggtgcccaggctcagcgacacggtgttagcccctccatccctagtctcgacggcggtcattacgccgggcggacgacgtatccgaaccgaccaccaaaacccagatacgagccggcccccactccggctgttctgtcgttgtctcctcctgttcctgcctagcctcatcatccactccccacgtgtgtccgcctagaggttatccatacaaaggtgcgtgatcccgcagggaattcgactccaaaaaaccattatactaggataaaatctaaaagattttgatttgtaatttttaaccttaattataataatataaattacgcgacaattgggtggtatatcggcatataaaagtgcacagaatgctgagagcggttagaaataaggcagacgatgttggcggcgggtggcagacctaatactctcagaagctcagtaaagccactcgtaattataaatggttattttttatgactttagactggtaattttatatttaattaatatatgctcagcttaaaatgcaatagacgatctaggaaataattaacttttatagttttttaacttctctagaattattgggaaagatgtatcaaaagcttgattgtgtatagtttcgactttggaagattacgtgattctgggaaccacagcggagctcccgtgccttcgttcactgtggcatgcgtggtctcccacccgccttgcacccgtctccgcggcgatgggtactgccgacatgacactcgctccagggtgggactcccgtacaacggcgacccatatacggctccccaggcgccgtgatgtacgcggtacgctccagagggaacacggacgccgcaccaccgctgacccgatcgctgcggagggagcaattaggtcgcgggggcctgcactgcccgcaactccgcgccagtacatcgtgtgcgcgaagagc

SEQ ID NO: 131 - DNA, 967 bp, synthetic construct
  misc_feature 1..967: note = DNA standard
  source 1..967: mol_type = other DNA
gctcttcctatactgttgaataggtggatcatagtctaatatcaaactaggaatatcttacgactatcgataggctggggaggccgggaaaccgtactattcggaggctgatgaattgcctatagttctgtccattggctgtctgctgcttcgcttggcccttcgtcgtcggcatctcggagctgtccgacgtcacggttctcgtcgcacacatgtgctgtccctactccagggtagccgattatacgttcctgttgaggaagggacgagagacggaggccgtagcttgggaccataatgttagagaagtcctggcgggaacagttgcgagcaggcttcgcaggtcgttaagtacactcatctacaacgtagcgggacggcgggtgctccgtcttaatacatccccctaatgtggagtatcgaagtactattcacatatttgacggttcttattggtattcatttgttcgctccattatgatataaactggcaatattaataattcagtacgtgttatgtctttggcctcgacggtaccggctccgtcaccatgtccccacaccgtccgcccgtggtagcgccccagcacgcaaaagtgctgtggcgtagggagttggtcgctttccgatcatttgtggacaacctggtagccctaaccccttctatataatggacttaaaaatcctcccgagcctccttcacctatgggagcgaggggcaagtccttgtgatttgccgctgaattggcgcacctcgatgcagtattttttgcagcattcatatataattattaaatgtaagtcgttcacatattccgtatcagatctcactaacaagagatttgagtatgataatattagttgacaatttcagtataacctgtgctgatctgctctccaaagttaatacaatgtaagatttggattactaaaggttttatattgaaagcctttccatttgaagagc

SEQ ID NO: 132 - DNA, 983 bp, synthetic construct
  misc_feature 1..983: note = DNA standard
  source 1..983: mol_type = other DNA
gctcttcctatactgttgaataggtggatcatagtctaatatcaaactaggaatatcttacgactatcgataggctggggaggccgggaaaccgtactattcggaggctgatgaattgcctatagttctgtccattggctgtctgctgcttcgcttggcccttcgtcgtcggcatctcggagctgtccgacgtcacggttctcgtcgtacacatgtgctgtccctactccagggtagccgattatacgttcctgttgaggaagggacgagagacggaggccgtagcttgggaccataatgttagagaagtcctggcgggaacagttgcgagcaggcttcgtaggtcgttaagtacactcatctacaacgtagcgggacggcgggtgctccgtcttaatacatccccctaatgtggagtatcgaagtactattcacatatttgacggttcttattggtattcatttgttcgctccattatgatataagttttcttatatattgtaatctttgagaactggcaatattaataattcagtacgtgttatgtctttggcctcgacggtaccggctccgtcaccatgtccccacaccatccgcccgtggtagcgccccagcacgcaaaagtgctgtggcgtagggagttggtctttgtggacaacctggtagccctaaccccttctatataatggacttaaaaatcctcccgagcctccttcacctatgggagcgaggggcaagtccttgtgatttgccgctgaattggcggacctcgatacagtattttttgcagcattcatatataattattaaatgtaagtcgttcacatattccgtatcagatctcactaacaagagatttgagtatgataatattagttgacaatttcagtataacctgtgctgatctgctctccaaagttaatacaatgtaagatttggattactaaaggttttatattgaaagcctttccatttgaagagc

SEQ ID NO: 133 - DNA, 1016 bp, synthetic construct
  misc_feature 1..1016: note = DNA standard
  source 1..1016: mol_type = other DNA
gctcttcatccgcattaattctaataatagtaaacgcgaataaatcaacttacctggggactcgatcgacttagaatgcggaaaatggtcatcctcaagatcaatgctcgccagggaggaaagcaaattggcggggacttaaggctaacactacggtccagatggatcgaggcggaggtaaacgttgcttgtagctgatgatcgagaacttatttgccgagaggcttgaaaaatggctgcatgggtgcagcccagactttttcttcgttccgacgtcaccgaccgcgattaccacaatactgacgtagcgggcctactctcctggtttaaactgacaatttaggagggtggtatacaaaagtgtatcaacattacttacgataattaccatactattgtggtattgtacatagagcaatagtttgtcacacgactcatttaattattacaaatataacgtatctttaattatagattgttttaaattcgaacgctatcttatctctatataaaaaatctgaattttttttccattcatccacagcaccatctaatttatatcagtatatgggattgcaataaaatattcctataaaaacaaaagaacaaatcaatcccaagaaaacgaattcctggatatacttcttggatcccttctgtatcctatcgagttacctcttctaccctaacgagacaatactaccaccttagccacccagctgtcaaagggagcgcgctccaggatggtgacctgtcacattccttcagcccggcgaatctcgggccaagctcgtccccgttgcaggcctcttgttctttcgctcccacatccgagcgagtaaagctgccaaccgaagttacacaagttatacatcacccggcctttagggtttattatcacatctagagcaagtgaccagatatttaggtgttaagatttttctggcagtcaggcagtaaagggccgcggaacccaaaaagtccttaattaaatagggtggcatgtgaggaagagc

SEQ ID NO: 134 - DNA, 994 bp, synthetic construct
  misc_feature 1..994: note = DNA standard
  source 1..994: mol_type = other DNA
gctcttcatccgcattaattctaataatagtaaacgcgaataaatcaacttacctggggactcgatcgacttagaatgcggaaaatggtcatcctcaagatcaatgctcgccagggaggaaagcaaattggcggggacttaaggctaacactacggtccagatggatcgaggcggaggtaaacgttgcttgtagctgatgatcgagaatatttgccgagaggcttgaaaaatggctgcatgggtgcagcccagactttttcttcgttccgacgtcaccgaccgcgattaccacaatactgacgtagcgggcctactctcctggtttaaactgacaatttaggagggtggtatacaaaagtgtatcaacattacttacgataattaccatactattgtggtattgtacatagagcaatagtttgtcagacgactcatttaattattacaaatataacgtatctttaattatagattgttttaaattcgaacgctatcttatctctatataaaaaatctgaattttttttccattcatccacagcaccatctaatttatatcagtatatgggattgcgataaaatattcctataaaaacaaaagaacaaatcaatcccaagaaaacgaattcctggatatacttcttggatcccttctgtatcctatcgagttacctcttctaccctaacgagccacccagctatcaaagggagcgcgctccaggatggtgacctgtcacattccttcagcccggcgaatctcgggccaagctcgtccccgttgcaggccttgttctttcgctcccacatccgagcgagtaaagctgccaaccgaagttacacaagttatacatcacccggcctttagggtttattatcacatctagagcaagtgaccagatatttaggtgttaagatttttctggcagtcaggcagtaaagggccgcggaacccaaaaagtccttaattaaatagggtggcatgtgaggaagagc

SEQ ID NO: 135 - DNA, 2939 bp, synthetic construct
  misc_feature 1..2939: note = RNA standard
  source 1..2939: mol_type = other DNA
gatttaggtgacactatagaagccagcaccgggaccacgcactgtccacccgcgcagcacgaaggcgcgcggcagaacgcagccccctcaggcgcttgcccccgcgctaaggacccacgcacattgtagatgaggccctgagacagctaatccttgacgcacgaggtcacgggcctcattctcaccggaagaagagacgcaccccgggcttgttggtcgtccaagagaggccccgaacgcagtgggacagcctccaacaatcgggcacccgtcctgacgcaccccgccccaccggagcgggtgcaccctgaccgttacgcaccccatccgcagctctccaccctagaggcgaggtgacgcatgccatcacgacccatgctcctacaaagccggtgcacgcagccacctcagtcatcggagcgccgccgacaggcggacgcaggctcacctgggcgcaggactggccagacaaccagacgcagatggcttgctaggctcggcccggagcaagcgataacgcatctcaggcccagagactctggaaagactgctggttacgcaatgcaggccgatggtggggatgaggcctctgggctacgcaggaggcggagactgaagtttgaacctgaagccctaacgcatcctgctgagatagagacccctcaagggcactcgcacgcagtgagactcttcgctagtgggcgaacaggcccgtcacgcacccctcaaggctcagcttgagtgactcaattgacaacgcacaatcaggtgcttgctcagatgagattcccagaacacgcactcaccagagcccttgcttgcaggaagtctcgtccacgcagggcacattgagcctgccatgtggtccgtgcaaagacgcacagccgcagggctagcgctgaaaattgtggaggggacgcatgacagatgagatcagactggcaacccaaagaaacacgcacagcgacacctcctgagaaagaaagatggaaaccaacgcacctcgcgagtgtgtgatggcctggctctggagaacacgcacagctgctccacctgcgacagcgggctgccagaagacgcacacatctctgtgactgacccttgtcagaccactccacgcatgttgcagacccagatccatcgccctgggagccagacgcagcccgacattggcatgcacaaggaagcagcgctgtacgcattctccgaggaagaacttttgcaccgtgccacagcacgcagggaagagctgctctccaggcaaggtgccagcggtacgcaactctgcgctgcgagcaccctccaagggcccctcgacgcagcagggtgagagagagatctctagaacaccagaaaacgcacctgtgacattcttccaatcccttcagcagcatgaacgcagccactaatgcaagagaagcatgtgaatggtgcacacgcaccaggggtgccggatccaatctctgaggatgccggacgcatgctgcaggcaagtcagaagctaatgagacggcgcacgcatggctcagagaaagagggccacttacaatgcacgaacgcaggctgggtccaagaaccgtgctctcagggggcagcacgcagatatgagaactcaaggtcagtcggagactagacaacgcaagtgaggttctgcgccgacccatgagtgcttctgtacgcactggagaacaaaactctgaccgagcagtcacaaacacgcatgctgccattgatctgccatccagcgacaagttttacgcagtctctgagtgactctcgaggcatcctgagggaggacgcatggacgtgcatttatcaggtctgtctgccatttcaacgcaaagacgtcttgaaaattcgaaaggggcaggtttaaacgcacatgactagcaaggctgtgagctaaccgacctgccacgcagagttcttgacgtcgctgggactaaccaatgggcgacgcatgagggaggttatagggatgaggtgatatctcccaacgcaggagaagaatgaaccagcaagctcccgaaacaccaacgcaccacaccactttgaggagctgaggagacgccggggacgcatagcagcccagcacgagagcatggcaaccgggcagacgcagcatgcctgaccggactgatgggagccagcaagttacgcacctcatttccttctcgcaggaggaaagggaacaggacgcacgttctgtcactggtgtcagcaatcaagacgtatcacgcaaggagcaagaaaaggacgcctcagtcagcaggaagacgcaggagagaagtgcatgatggacgcccggggcatgcgacgcaggaggcgtgtgtgagacctctgcagccacagcttgacgcagcaggcgtccaagcgtggataggacctgtgccaacacgcaggatgtacttcgcccgaacccatcgctgattgcatacgcactggtccaagacctgctccgaggaacacctaggcgacgcatgtccagtcaaagctgccgaccgagtgactgcagaacgcacggtcgcgcactgcctccaagaagacttgcccggcacgcaggcaaccggagtggcttgctcaaccttcttgcttgacgcaagccccagagttgacctgtccatcaaattccctggacgcacctcagggcccatcctcaaagtggatgcaggccccacgcaaaagcggcaccactccgcccacttgagagttctgaacgcatgcagaagccatctctggccagccgttgctagaccacgcatcagccctggcccatgacgtaacgtccactcacagacgcacagcagaggcagtccctcagggtgaatcagtgcatacgcagagcctgacactatctctggataccagtgcctcccacgcagtcttcccgttcccccaagtgcaaaaaaaaaaaaaaaaaaaaaaaaaaaaaagaattc

SEQ ID NO: 136 - DNA, 2201 bp, synthetic construct
  misc_feature 1..2201: note = RNA standard
  source 1..2201: mol_type = other DNA
gatttaggtgacactatagaagctcaatgcatggaaacgcaattgctagacgagaaatcaaaatcaccattgatgaacgcacacctagaatatctctgggttagctttagaccaaaacgcagggattactccctttgcttagagaatttttggttcacgcagctgtgagctcctcagccaaaaagtgccacgaactacgcatgcattgtgatctccgtttgccccacaccttatctacgcacaaatatatcatttttaagtggggatttgatctctacgcaaaatgctgtgaactttggtcaattgcttggttgaaacgcatggaaatgagaggaacaatcctatttttccagcctacgcaccgtggtgctgagacaagaaagttctcctcagtcgacgcactttctgcgatgacaaaacccatgttaaccctgagacgcaggtttgatggaacctgactcaagcctaaaagcattacgcacagccggtctgctggcacctactggccatctgctcacgcaactccatgagctcagacacgggtgcaggaagttgtacgcaaggaaggggaccaatgcccaccaggggcaagaggtacgcacatgccctggagtgcgctgaccatctgcatggtgaacgcaatgaagtgaggcctgtatcaggtctgagttgggtgacgcaagaaggccaagcaggggtgtcacgctctaaagtagacgcaccaaaaaccgtcctggctcaataaaaggcttgtccacgcagctataagcctcagaccataaacatgaatggcactacgcacaaacagcataccacgccagtcgccgacacacggtacgcagctgaaccctgacgtaccaccattcccgctatgaaacgcatatccacggacatgcaaaacagaacgaatgggtcaacgcaagaccagttgccagggggggtggggcatctgggggacgcagtgtgtgtcaaggagccgagctcgctccttccgtgacgcagtcctaaccgggaggggcagccgtccgagagccatacgcaactgacaaaatgggcgagcgactctcttgtgaggaacgcatgagacctgaagagaatgactgggaaacactgccaacgcagggccaatcctgtcaacatgagtgtccaagcagctacgcacccctgggtgctgggtagccgtcagaagataccccacgcagggactcttcagagctctgtgtgtccccctatcagacgcaggcacaaagacatcgcacatgaggacgtttcactaacgcagagaactctgtaccaaagtggtgggcacgaagccaacgcacgctgtccaccgaaagacgactcaagtacagtgcaacgcacaaccctcatgagcattggaggacgaaactggtttacgcaaggctgtagcaggaaaatttgacctccacaccgtgacgcagccaggtgattgcctgccctaaggggcccaggtcgacgcacccagaagagctccagctagctgatcagtggacctacgcagcggggactttagggatgctacataattatgctaaacgcaagcgacgtcagactgttattgccgtaagcccagacacgcagagcactctgcttgaatcttggatgctgctgagatacgcaccattatgaagtggagtgaaaggggcatggcagtgacgcaagctcgaaatgtaaatgagtgacaagatctggcacacgcattgtccttgctgatccccctccagattttcacaaaacgcaccagagatggccctgaagttcccgtcactggcaggacgcacagactgggggagggcaacccacagccgacctaccacgcaagagcaggctgactgagagagctgcgctgagaggaacgcaaactggaagtccagccgaaacccagcaagagtgtgacgcactgagcacgagaagctcccgcgcccacccttgtgtacgcatgaggaatccttgcctcccagaaggcctccaagaaacgcatcgccttggggtccgaagggaagagcgccgaggggacgcaccaacatccattggagacctgtgaggtgatccaagacgcaagcaaacttgggggcagaagcagcccagttgggaaacgcagtcgtttctccacacccaggaagaaaaaaaaaaaaaaaaaaaaaaaaaaaaaaaaaaaaaaaaaaaaaaaaaaagaattc

SEQ ID NO: 137 - DNA, 3705 bp, synthetic construct
  misc_feature 1..3705: note = RNA standard
  source 1..3705: mol_type = other DNA
gatttaggtgacactatagaagccagcaccgggaccacgcactgtccacccgcgcagcacgaaggcgcgcggcagaacgcagccccctcaggcgcttgcccccgcgctaaggacccacgcacattgtagatgaggccctgagacagctaatccttgacgcacgaggtcacgggcctcattctcaccggaagaagagacgcaccccgggcttgttggtcgtccaagagaggccccgaacgcagtgggacagcctccaacaatcgggcacccgtcctgacgcaccccgccccaccggagcgggtgcaccctgaccgttacgcaccccatccgcagctctccaccctagaggcgaggtgacgcatgccatcacgacccatgctcctacaaagccggtgcacgcagccacctcagtcatcggagcgccgccgacaggcggacgcaggctcacctgggcgcaggactggccagacaaccagacgcagatggcttgctaggctcggcccggagcaagcgataacgcatctcaggcccagagactctggaaagactgctggttacgcaatgcaggccgatggtggggatgaggcctctgggctacgcaggaggcggagactgaagtttgaacctgaagccctaacgcatcctgctgagatagagacccctcaagggcactcgcacgcagtgagactcttcgctagtgggcgaacaggcccgtcacgcacccctcaaggctcagcttgagtgactcaattgacaacgcacaatcaggtgcttgctcagatgagattcccagaacacgcactcaccagagcccttgcttgcaggaagtctcgtccacgcagggcacattgagcctgccatgtggtccgtgcaaagacgcacagccgcagggctagcgctgaaaattgtggaggggacgcatgacagatgagatcagactggcaacccaaagaaacacgcacagcgacacctcctgagaaagaaagatggaaaccaacgcacctcgcgagtgtgtgatggcctggctctggagaacacgcacagctgctccacctgcgacagcgggctgccagaagacgcacacatctctgtgactgacccttgtcagaccactccacgcatgttgcagacccagatccatcgccctgggagccagacgcagcccgacattggcatgcacaaggaagcagcgctgtacgcattctccgaggaagaacttttgcaccgtgccacagcacgcagggaagagctgctctccaggcaaggtgccagcggtacgcaactctgcgctgcgagcaccctccaagggcccctcgacgcagcagggtgagagagagatctctagaacaccagaaaacgcacctgtgacattcttccaatcccttcagcagcatgaacgcagccactaatgcaagagaagcatgtgaatggtgcacacgcaccaggggtgccggatccaatctctgaggatgccggacgcatgctgcaggcaagtcagaagctaatgagacggcgcacgcatggctcagagaaagagggccacttacaatgcacgaacgcaggctgggtccaagaaccgtgctctcagggggcagcacgcagatatgagaactcaaggtcagtcggagactagacaacgcaagtgaggttctgcgccgacccatgagtgcttctgtacgcactggagaacaaaactctgaccgagcagtcacaaacacgcatgctgccattgatctgccatccagcgacaagttttacgcagtctctgagtgactctcgaggcatcctgagggaggacgcatggacgtgcatttatcaggtctgtctgccatttcaacgcaaagacgtcttgaaaggaacaatcctatttttccagcctacgcaccgtggtgctgagacaagaaagttctcctcagtcgacgcactttctgcgatgacaaaacccatgttaaccctgagacgcaggtttgatggaacctgactcaagcctaaaagcattacgcacagccggtctgctggcacctactggccatctgctcacgcaactccatgagctcagacacgggtgcaggaagttgtacgcaaggaaggggaccaatgcccaccaggggcaagaggtacgcacatgccctggagtgcgctgaccatctgcatggtgaacgcaatgaagtgaggcctgtatcaggtctgagttgggtgacgcaagaaggccaagcaggggtgtcacgctctaaagtagacgcaccaaaaaccgtcctggctcaataaaaggcttgtccacgcagctataagcctcagaccataaacatgaatggcactacgcacaaacagcataccacgccagtcgccgacacacggtacgcagctgaaccctgacgtaccaccattcccgctatgaaacgcatatccacggacatgcaaaacagaacgaatgggtcaacgcaagaccagttgccagggggggtggggcatctgggggacgcagtgtgtgtcaaggagccgagctcgctccttccgtgacgcagtcctaaccgggaggggcagccgtccgagagccatacgcaactgacaaaatgggcgagcgactctcttgtgaggaacgcatgagacctgaagagaatgactgggaaacactgccaacgcagggccaatcctgtcaacatgagtgtccaagcagctacgcacccctgggtgctgggtagccgtcagaagataccccacgcagggactcttcagagctctgtgtgtccccctatcagacgcaggcacaaagacatcgcacatgaggacgtttcactaacgcagagaactctgtaccaaagtggtgggcacgaagccaacgcacgctgtccaccgaaagacgactcaagtacagtgcaacgcacaaccctcatgagcattggaggacgaaactggtttacgcaaggctgtagcaggaaaatttgacctccacaccgtgacgcagccaggtgattgcctgccctaaggggcccaggtcgacgcacccagaagagctccagctagctgatcagtggacctacgcagcggggactttagggatgctacataattatgctaaacgcaagcgacgtcagactgttattgccgtaagcccagacacgcagagcactctgcttgaatcttggatgctgctgagatacgcaccattatgaagtggagtgaaaggggcatggcagtgacgcaagctcgaaatgtaaatgagtgacaagatctggcacacgcattgtccttgctgatccccctccagattttcacaaaacgcaccagagatggccctgaagttcccgtcactggcaggacgcacagactgggggagggcaacccacagccgacctaccacgcaagagcaggctgactgagagagctgcgctgagaggaacgcaaactggaagtccagccgaaacccagcaagagtgtgacgcactgagcacgagaagctcccgcgcccacccttgtgtacgcatgaggaatccttgcctcccagaaggcctccaagaaacgcatcgccttggggtccgaagggaagagcgccgaggggacgcaccaacatccattggagacctgtgaggtgatccaagacgcaagcaaacttgggggcagaagcagcccagttgggaaacgcagtcgtttctccacacccaggaagaaaaaaaaaaaaaaaaaaaaaaaaaaaaaaaagaattc

SEQ ID NO: 138 - DNA, 917 bp, synthetic construct
  misc_feature 1..917: note = Standard
  source 1..917: mol_type = other DNA
gctcttccagtcaatactcaccccaatatcacttcagaggtctccctaactggttaacgggaaggggcgctaaacagaagcctaatgagatcggagagcggagggtcggcccaacgtcgcactcagcgctctctcctgcctccacgacctaccagctaatgtgcgtccgcatccgtagttcgccccatcattatccgctgacccactcagtgggtttctattactagtacagattcaggggcccgacgggcggcgcttgtgggggggacatccaaacctacgaccggatgactgctgtcagacagttggcaaattatgtcgctaatgcgacagagggtggtgtgaaaaagcgaagggaataccacttcccagcatggcagtaaaggcacctaaagaaacagaggagtgcaaagcgaaaaaatcaaccgatcgcgctaaacccccgtaccgcatgagagatgaatatgaacctgatcttttgctcaattcgaagcccatcatggcagcaaaatctagttacaacgaactcgcatacaatatccacattaaacaatcacgctgaaagtctaccaatcgttcggtgaaagttcaatatcgcctagctacagtgaaatcttgacgtattccatatacatttcttgcgtcttaggtatgaagtactagttaatcagtaatgggtaatgagaaagagaaattgaaccatccttctttcagactaagtagatatgacaggtggttaaataagttgacgcacggatatgaattcgcggatcggaataatccgaccagttacacttcacccttacttctcagggtacgattgatatcaggaattctaaatttatatgtcacctaatgatctttcttgactagtatgttaagatggagtcatgtggtatgggatgagtgagaagagc

SEQ ID NO: 139 - DNA, 918 bp, synthetic construct
  misc_feature 1..918: note = Standard
  source 1..918: mol_type = other DNA
gctcttccagtcaatactcaccccaatatcacttcagaggtctccctaactggttaacgggaaggggcgctaaacagaagcctaatgagatcggagagcggagggtcggcccaacgtcgcactcagcgctctctcctgcctccacgacctaccagctaatgtgcgtccgcatccgtagttcgccccatcattatccgctgacccactcagtgggtttctattactagtacagattcaggggcccgacgggcggcgcttgtgggggggacatccaaacctacgaccggatgactgctgtcagacagttgggcaaattatgtcgctaatgcgacagagggtggtgtgaaaaagcgaagggaataccacttcccagcatggcagtaaaggcacctaaagaaacagaggagtgcaaagcgaaaaaatcaaccgatcgcgctaaacccccgtaccgcatgagagatgaatatgaacctgatcttttgctcaattcgaagcccatcatggcagcaaaatctagttacaacgaactcgcatacaatatccacattaaacaatcacgctgaaagtctaccaatcgttcggtgaaagttcaatatcgcctagctacagagaaatcttgacgtattccatatacatttcttgcgtcttaggtatgaagtactagttaatcagtaatgggtaatgagaaagagaaattgaaccatccttctttcagactaagtagatatgacaggtggttaaataagttgacgcacggatatgaattcgcggatcggaataatccgaccagttacacttcacccttacttctcagggtacgattgatatcaggaattctaaatttatatgtcacctaatgatctttcttgactagtatgttaagatggagtcatgtggtatgggatgagtgagaagagc

SEQ ID NO: 140 - DNA, 1014 bp, synthetic construct
  misc_feature 1..1014: note = Standard
  source 1..1014: mol_type = other DNA
gctcttcgcacagatgcctgtgtaagctatttcattaagatcttatataaatgtagcattatttctactttagatacaaggttttctttaatttttatattcctatcaaacataatagtagattcttttttctacataattttgaaataacttttattcattttcatataagtactactatttgaagtaatttgtaattggaaaaagtattttcgtctataataataaatttcgtatatagtaggactattaataaaatggattacataatactcaatcattttaactgttaatatttatcatagtaataaacttgccattgagaaattgaaagtcgtataaaaagtttagtactggttccggaacaattcacagtttaaagatataatattacaaatttttctactcgtttaaacataagtgaataataattggatatagagtagcaccacattttaggacatatagtttttactattgaaagataaaatatgtatctcaatatcttattatttagtattctttttattacgtaatttggattctagactaagacaaattagtaaaagacagtaaattgttattattaaatagaaaattcctgaaaagtctatagttaactctttatttcgcaacagataccctatgaaatttataattctaattatactaattattctacaagttttaaagtgaattcttgaaaaagtatcacaatatataataaatgatttattagagagatttatttggttatgcttgatcctataccttaagctacaaacaaagagcaatcgacaatattctagtatagtttataataatcaaattatcgaatgattattaaaaacagatatcgttactatctaatagtaatttttaagctccttatatccttagtataaacttgccgtaaaataaaatatttaagattttcttatcagatataatcttcactgataataataaaataacttatcatgacaatgattgtcctggtgagaatggaagagc

SEQ ID NO: 141 - DNA, 1014 bp, synthetic construct
  misc_feature 1..1014: note = Standard
  source 1..1014: mol_type = other DNA
gctcttcatgaacttatatattatcatgtatattctcacaccaatctaaagtaataaaaaacaaaatcaaatattacaatcagctaactttgtgccttggagctttgactgttacctaacatttaatataatataaattctgtctcaaattaaaagagactacttgcaatgtatgaagtataggaatatatgtttctgatgtcctataaaaatcataacttaaatttactttatatcttattagtataaaaagattacatttagaataagaaaataaattaattaatttgcaaattttgaaatttattatcgctctaaactactaaaagatttgattttcatttaaagataaagagtttattaggttttttttttaatgtcgaaattaaacttaagggtgtatttaatatcaaaaaccatcataagattctataattttattcaatttaactattgttgttatacttgtatgacgtatcaacgctaatagttatttattatactttaatgaatgaatagtacacacataactcgtattataatacattatatattaatctatatttgatcctcaatgttaatcgactctatgtcaaggtaattaactttaataatggacatatcaaatgttcgtagggaagatacttgacataaaatactcagtacgtttagaacttgcacccattattcttataaataccaaaaaaactgctgccaaaataattcttcataaatatagtttccattgtctgacaatcctgatgaattagcagaattctgttaaaataaacaacaatatcatatgttagaagttaatttttatttactttaatatatgctcgtccctgaacgacaattcttaaaattatttagttaggacactctcttaatatttttcagcgaatccgaaattaatttaaatttataggtgtttgcatgatttaaactaaaaatgcgcgatatgcatttaatagaccaactaccacatcaattgatattaattagaggaagagc

SEQ ID NO: 142 - DNA, 1014 bp, synthetic construct
  misc_feature 1..1014: note = Standard
  source 1..1014: mol_type = other DNA
gctcttcgcttcaaacattactctcgttgaaacactgagatcctttctgcaccattattcccacaatatatgacatattttgaggtacaattttatagttaaatatataattttataaccaatgagttttaaaaattcatcaataaatcaccttgtagatatagaataagatactattttttttatatattaatcattataatatttatcacagaggtagaaagtatatctactcataaacttccttctataggattaaggatatattattgccgttagaatagacatacttaataatagaactacaaaaattttatgatgttgtttttatgcacttatggtagttaatgattatcactaaagaaatataaatagataacaaatcatataaagattgtaaatacattgtgaatcagccgattaaatataaaccgcgacagtaagaaaatattttatggaaaccgcgctaaatagtgtaaccctcttagcggaacctagattctaaccattatacttccagtgatttaatatttaataatatttttacccgcaaacccaaaattaattatctaaatttactgatgtaatgttctaatgttgacggttagtcatgtagactatttaggtatgaatataacaatatatatatactgcaaagttctagtttagacatataaagtctgttttgaatatgaatattttgaattcgaagaaaatttcctctcaacatatacattattaactatgtatacgtatgtgcgagtaacttcttttataatattacaaatacaatgtatcctatatactcgagaatattgacgtatcttaaaactatttttattcataaagctatgatcatcaattcaagtgcaataagtaacttttaaaatagtttttccggagaattatttgtctaaatattgttccaaagcgaagtatgagtctaaatcggggatgaaatagataataattgtattcataagtttatttttcaaataagagtatccgaagagc

SEQ ID NO: 143 - DNA, 1014 bp, synthetic construct
  misc_feature 1..1014: note = Standard
  source 1..1014: mol_type = other DNA
gctcttcctggagcgtcagagcctccccagctgtcccgagcccacactcacgcgccgccccccagtagagcgccctggcctcaggacatcgacccgcgttcgctccggtcagtaggaggggaccaccagcccggtcgtgttcggacagtccgcctcgctccccccgcgagagagctcatcaaccctcctcgctccccccagctccagtcctcaaagaccatgaaccgtgccggtgcggctcagcgcggaccccagaggtcctacccgcgcggactaccgtgttagcgaccattgttgtcccgccccgacgagaccgccgtccaccggcggtggctgttggggtgcgtacgccaaccccgacgccttggcgaccccaacccggctacccggttcggtcgtagcgaatctcgcgtgagaccggaggtagggcttccaggctcggggtggcgggctcacccatggcaatgtcgccgccacattgagctgcaggccggcgttgaccgtctgcctccacgctgcgccaatagaaggattgtcgcgaggcccccgacgccgatgacgggggccgggtctgtatggctcccctgaagaaggcgccttctgccacgccccctccgtgtcggctcttgtccccgcaccactccgtgggcacggttcgggggatggggttcatcgacccccggctgacgagcgagcaaacaaacgggagcctacctaacaggcacccgcctcgctggccctccctcgtgaagtgaacctccattatgtcgccccagtgcgcacccccggcaccacaaggaagcccatcggtcaccgggccaccctccgacggagaccgcgctccctgggctgtatagccggggaaaatgcgccagactcgggacggcgccgatccccgccggtctggctacgagggaagacggggttccgccaaattgcagcaaaccataagggtgctgtggctgaagggacagatgtcgacgcggacggcccaccggggaacccgggaagagc

SEQ ID NO: 144 - DNA, 1014 bp, synthetic construct
  misc_feature 1..1014: note = Standard
  source 1..1014: mol_type = other DNA
gctcttccgagcccaagatcctcctccagtggtacgttgaactcgcctgcccctccttgggcgcaaccctctagaacgccgggcgtggccacgcggccccatcccccccagcggtaccacccggctggccccggtgcccgcccactatacgcgcgggcgagtacttggcgaaggttaagctgagtattccgctgcggggccaagacggtcggcgacgccgcactgtcccggcgtaattcacgcttgggtcggcagtcgcgctaacacgcgcttcccgtccggagccgacggccggagcaacggtcgggggaggggcctatggacgtcgacctgccgggggtcctgatcgtacccgcaatcccgacgcgcgccgcggcaagttcatgccccggtagccgggctccgtcgttccgtgtggcgttagggtcctcgccgaaggcgagttcccaagggcactgccgtgcgtgtaggactggggccccgcgcccccccgggcgaatccctggggactctccacggcggggtcgactgtcaccccgtcgcgcacccgtgtgggcttgagccgcccaccggacgtgcggcgccgttcttatcagccgctagtggttgcctccgcgggctagcgcccaacccgagccggaacggccccgccggccagcgcatcccctatttcacgtgccccggagcagcaagcagaaagcttctgctcgggccgcgcgccggtcaacctgggcggtggcgcagaacctaaccaatgcttgcgccctccaagacgccaactgcgggttattcgcccgtgcgagtcgcgcccgttcggcgggcggggcgcgcgcctcgtcgcacgggcggccggctgtgattgctcccgtcggcgtcccgcaccctcgccgcccctcgcttgtcccccttcgcgcactgcgtgattagtcccccggcatggggttcccggcccggcacggttataaactcctcaacccctgtgtaggggatcgggtccgtgagaggctgaagagc

SEQ ID NO: 145 - DNA, 1014 bp, synthetic construct
  misc_feature 1..1014: note = Standard
  source 1..1014: mol_type = other DNA
gctcttccacacgcctgggtaatggtcccagttccgtacaggggtccaccgcttcagggtacgggagtcccagtacggcttaacgtcgctccacgtgcgacccaggcctctccgcgagctccgcaccgcccctgtttctgcgggcgtggcccccttcttgtgccgacgatctggccctaacttaggccggccccagccaggccctttacgctccatgcgcatcgcgtgacgtccttcccagtcagaccagcgaagcgggggaagggcgtaagccctgcaggtgcataccctggcgggcgatgtcgtcgggggtcactggcgagaggggacccgccgttcccctaccgtcttcctcaacggggcgggaacggcctcccccgaggggggcggggctttggtcatctcgcggacgccgccatggagtacggcccggatgcagaagtccacagtgtatgcaatgtggtccgcgacggagtcccggccacgggtagcgctccattttcccgccaacagcgtgctgcttgtgcgggcttctgggccgtaggggcttgagcggagcgcgtccagtagccacgaccttggtagggtcggcgtcgatgacaagcccggactgccccacacgccccggtacctgcagaagggcgtgaccgcttagcgtaatgctccgacgtgacggtagccgattggaggggccctccgaccgtgtgcggcctagcacgggaattccgcgtccggaggacaagactgctagccgacagcagcgccgagggaaggttgccgcggacccgcgcccacttgtctctcgaggggaccggggcggcgctcggctcggacccagagggctctcaccactagaccctccgcccaggatcgctgctgggcctgtcgtgcgacacctcaggctagggtgcggcccagatcaaggaacgccccggtgggccgaagatcccagtgcgcgacgcctcgtccccccacgaggtcgttgcggcgaacttgatgaggccgcagaagagc

SEQ ID NO: 146 - DNA, 1014 bp, synthetic construct
  misc_feature 1..1014: note = Standard
  source 1..1014: mol_type = other DNA
gctcttcaccgccaagcgaacccgttcacaacggccaattcggtgggagccccgccggcctagcgccgtcgcgcaccgcgcgttgcgttgcgttgcagccgtgcggggggcagcacgtgcctcccccccatcgggtgcaggggaggcccattccacgcgggggccgacccgctgccttcctgtccggcacggcggtggccgtcgaccgcgaacgtgcccacgctcctcgctaactcgggccttggctctcgatccgttcgtgcccccggacttccgagcgcgctggcgatgctacaccatttccaccaaggcaccacgcattgaggaagcccagacaagggcgatggccatctgtgccgtgttacgcacggaacctcgcccgatgctggcgccgcaaggccagccctcgacatgcgcgacacccggggtctgccccccgaggcccggcgcgagcgatggcagcgtctgcgagtatccccctgctgccagtgctggtgcccccccgcggcgaagtgggggcgggcgatagggcccttctgccgccacgggacaccaagggccgctccccccccccgggcataaagcaccagggactcgtcgacgtcgatacatactgattcggagtgtggagcgctaaccccggccccaggaccacgcatctgtgccctggtgggccactgtgcctggcaccccgcgggagcacggcaccgggcaaacgcgtaacccccgcgcagctgcacgttaggagtccggcgcctcccaccccggcgccctatcctccagggtgggagtgcggcctcgggccccgctcctactcgggcgtcacgtgcgtgcgccaaggacattcaccccgctccgcgccgagcccgtgcgcgccctcacgccctccccggcagacgagtgatccgtgcgtaccaagacgacagcgtgtccgacagcctcaggccccaacagcgcgggagagccctggcagcaggacgaagggccggagctcgcagtcctgaggggaagagc

SEQ ID NO: 147 - DNA, 1014 bp, synthetic construct
  misc_feature 1..1014: note = Standard
  source 1..1014: mol_type = other DNA
gctcttcagcgggtccggcttttaggccttcgcaggggcttgcgccccggcgtgtgaccgactggtcgcctctgccaccacgaactcgcatcccgggtccttgggccggcccattcgcccaggccggcagctccgcgggtaccgtcaggcggccggaggggagagcgccccgcccacccgcgacggtaacgtcgcgcgcccgtgcgaagcgtcacccgacggggtcgagggaacgccaagtgtcccgccgccgcctaagcagaggatctgggtcccgccgcggcccgtttccgtagtgggctcttagggccatccgcagcagacggacggccgaccgacctaagtccagcctgctaaccccgggtagccgcgctggcggcaatgccgacgagccgggacgccggacgctcaagcccgcacgtcggatgacgcgcccaacgtgcgtcgcacggccgcccctggcgccgtcggccgctcgagcttgcatcagggatgagaccgctcacgccacgggcttccttaacggcggcccgcacgtgcgtacgccccggaagggtgcacctatgggcgcgcccgggccccaagccgcagaaagtgtccgcttgccgttatgaattgcggcaaaaaggtggcgccccgggtagcaccgaggggggtggggcaacgctcccctgccagcgcaccgcgccggtagcgcgaccgcgataaccgtaaaggacaccacgcgcttcaagcggcacagggccgtagatctcccggtgaccgtgattcgaggctctctggggcaaaactgtgcctgccacctgcgccggccccgcccccagccccctaccaccggcgacccgcgatccggctgcctttggcagcgctattgcagccggccggcggcgacggaggcccgggcccgtggcacacacttgcggcccccgcgggctcgcgccgccgttgagtgcgcttgctggggcccccgtcgacccagcgcgctcacagtatgcggactgactatagaagagc

SEQ ID NO: 148 - DNA, 1014 bp, synthetic construct
  misc_feature 1..1014: note = Standard
  source 1..1014: mol_type = other DNA
gctcttcaaccggctcacgaggagacgctcgtccctcgagcgggggcgagccggctcttgcacgcccccgatctgccaaacagacaccgcggtgaatcgcgaaaccgctgggaacgcgaaggccggccccgcgtgaagcatccgccctgcgtcccaccctcacgtggcggcgcgcacccctcgactgtggccggagtggagggcccaccgacgcgtctgcccgtggctagtgaccctcgcgggggaaggaaggcgccccacatggcctcatcgccccctctgggcagtccagcccccccgcgccgccagacgccgcagcgccggcctgttaagaccaaccacttcgtagtgccttccgcacaacgcggacctctccgctggtgacaccggccgaggcctgcagaggaggtgaccgcttcctgtacgccatgcccccccgaatgcaggctgggggccctcacgtggccccccggcaccggtccctgcgtgtctggcccgcgaagaagggtcgccctgctcggcccgcaaacaaggacggcaacctggctgcgagtcgtacgcaactaatcatgccgacggccgccctccgcccatgcagcgcccccgcccagagctgactcacccggccgtcgccgtgtagatgcacccctcaccctcttcacacagttaaacccgccggggccccgggccacctatgttgatgacgccgcaccggtcgcggggcgagcgttgccctgagactcggaaacccccggcccccacactgccagtacccccagccacgggggcaccagcgcgcctttgtagtgcgcgccacccaggggttccgggaggtgacccagaccaccccgtcgcccccggttgcgcgctcgccgccgccgccagacgccggcagaggcccagcgctcgccgccgccaacgccgcaaccgtcccggcgaagaccccaccccacacgacacgccctctcctggtgggccgcgggacaatggggagggtgcgccgtcgcgaagagc

SEQ ID NO: 149 - DNA, 3232 bp, synthetic construct
  misc_feature 1..3232: note = Standard
  source 1..3232: mol_type = other DNA
gctcttccccgcttaaactataaatattataaacactcggcacgataaggtggtatcttaacacaactatttggaatgggcgtaagacggtataaagtttccacaatttcgaatttgatctaggttaagcaatatgtatgatttgatcgtcacaatgacataatagagagattgatttagtgactcggacaatagattataaatgcgttgtgagattagttagtattaataactaatagctttcaatcaagttgttaataatgtagattaggagtggggcccgcagagataaactcaattgatagagtattgaagcagaatttatagatatcatgttatgtacgaatttaattcgtttcgcactcccacatggcctgaattagggtctcgcttgctgacttcgtagtaaatatggctggtaggagctatgctaggttgcgattgatacaagtaataaccgaatagtacgcggacgaagcatacagatgtgataacccttggcaccaaatgaaaatgtggggataggcaaagcacgcgtggccgagactgtctggtaaggggctgatgttgatactactaaggtacttatactggggactgagggacgaaagattagaaagaacatatcgtcaagactgacgcaatatcactaatagagctaaactgaatactgccctataaaacctgaaaattcaagaaggaagtagagccagggagataaagcctactctattaggtttgaagcaaatgttggattacgattgacagtcgacatgagtgtccttactattactcggtatttgcgtataattgacccgaaagaagcctacaatcataggtttaacaatgaagagtcggatgcggtgttaaaagaaaaaagagaatgctgttctttggagttaatagtagacagataggatcagtcataactgattgaaaggaatagaaacaagttattctagcgaacgtaaaacttttaaaaatatatcaagctaactaacagcaatttaattgagcccggaaacgttggatttgatttcgtaattatggtgactggtaatgagtactagccaccttacaactaactaaataatagcaggctccgcctgactcgactttagttcttatgaccttagtcctgttgtttaatgtgacaactaaattgaagtacgttttcaacacggtcccaataaatcaaaagccaaggggtactaagaatgaaacggttctaatcttatgacgtaggatcgtaaatagagtagttcggactttcaaggtcagagcgactgcggtgtgagtgaatttttagcatataggggttcattctttctcgtgattgatgagcacacaacaggttattccatatctttgtacaatgatttagtctatacgcaaagaaggttgaggaatttgagttacatcagtctacagaaacaattcgaggcaagagacgaaatgcttgattgactcaccgcagcataattatgtgcgacaactccgaccttcaggtatgtaaggatcttggaccctatcagtccaatcaaattcaatggtgatgtttgtacgcttcaagtgaaatatgccgcagttgatggacgcttgcttttttagatttgatagggggaagtaagccgaatgtaataatattcgcacgatacaatatagtgtaatttagtactttcgttttgagtaggatataaagtaactattacaataatcttcaaattcattgggtagattattctgttgggcttctttctacaatagtataagagtcaaagattcgtagtggtctaagatactatatttcctgatgtcgacttgctatgaggacttcgaacgcagacatgtacgaaaaggaacatatgcggttgacgtacttactggtaaatatacgatgttgtgaatcaagagtcaatgctgtttaaagtagccctaagtatccgggacatagtcagcataaaggtcttaaatataaaacaaactggacatatatttcagaaggtcactcggatcattaataattgaacaggcacttctagtttagatgtaaaacgcgtagttaaggagttatatatgaacggcttcgcaactatgaagtagctgaaggtttaagatattaggccgcattgtttcaaagcgaatgccaactgctattagtcgatgcattaagtttatagacaagttttattgactgggaagcgataaacgtttgctaaaaacaagtctgaggcgaaaactaagactaacgaatgttacgctatatagatatcctcctttcggtaagttcatcggggttgagggaaaacttaggtgggataggagatgtaagcagtcactagaagcaaaaaaagctacaagtaaggtcggagttttgacagtacagcacagtaagatcgcacaatccgaaaaccttgaacacatgtattgatctaaataagaacgtaaggtgaagatttgtcagaatcatatctaaaactaactgagtaactgcacgcataggcgtggtttttgacttaaattcatgaagatttaaagaaggcctaacagatacactcaaaacaaaatattcccttttaaaacgtgtcacaaaaaaaatctataatggataaaacatactatactccactctaatcactgtctgggtttagttaataacattacagttgcgaaagtccgagtgtgttctggtagaaagaggggtaatctcgtatactgttgttaggagactgaacaaagcgacagtgtaggtatataagctaatggcgttgccacaattcttttttggcttggttttggattatccgccagaacctcaattagttctaattaaccgtcgacgatgtcatgattatgaagagaatgaggttgaacgctcagctactatgttaatcaggggtagcttccatttgttagataacctgaataaaatatataagtcgtatgatggactgggcgagagacatagttagtgagactcatagaagacgttggagctgggttgggtataaataaatgttcatgttaataactaatagcccatgagacgcgtccgggatattgtaccctaatgaccgagttaatgtgaacgacgacactgtaccctagaacttaattttgcagtcaagatcgagaatataagccgggaaatagagactcgtttagctacgtacggtatctgaaggaggttgataatcgcggttatgaacgaatatcacaaacaaagaagagc

SEQ ID NO: 150 - DNA, 4653 bp, synthetic construct
  misc_feature 1..4653: note = Standard
  source 1..4653: mol_type = other DNA
gctcttcacttatggaatcaaagcgcgaggtaggtatgagcggggattgccgttaataaacgaacaagctgccctaattgaaatttctcaggtatgcgcaacgtcattgtgaaacttgggttgagggttcaaggtccgtactcacggtaaaagcacaaacatgcaaggcaggcggataataacatttagcacgatcgttgtatcttcggcgtttggttggaatcagccctgtctagtatgcgacaacgagctatcaaagacgacaagttagagtcggatcatcgtggaagagataacaagcgaaaacgccctcggaccgatgcctgccttggcacaggagggcaacatagactgaggagcacaggtgtacgatcacccggtgcctctcgaggagtgcgacgcgcaagaaggtgacgtcactgtcagaaagtcccggtcgcgtaacatggcaaaaagtactcccctgtagctggcatgagtcatcgattgttggcagagaagtgcactaggcaacattgggcgagtccccgccgcagccatcggacacgaggccgtcctactgagcactatggggccacagcttcggaagcactacgagggagcctatacatgtaagagccgtaagcaataggtgggcacaatcatgatagaatcgcatcatcgaacaacggcggttgaaagggataagggacattgttggaccttacagggcggtccataaggagagaaggtccatcgcttggccagtgatggtgcacgactgagagcacatttctggcgccattcgcgggcgtgaccccatagtacgttcgcaaaaagaggactcaccagaccacatccgaaaccagggcttgcgtggggggccgttgatactgtgttgcataaatcaggctgagagatgatgaagtcccaaatcgtaaaaagcgggaaaaggggtatcggagctaagacagctaaccactatggcgatatctacagctcctgagtaccggcaaataggagagatgcttaaggtcaccgcttagaggaaagatacaccacccaaagacatgtctggctaataacccagtggaaaggagttactaccccatccgaggagtgtgtatcgactatttctctttgtactaactagctcttttcttggacttaatgggcactttaacagcgagcttcacaatagtgattaatgatacgaaaagatagcaacgacgatccatgtccccaatacgacctttacgatctgtactgggtccggtacggccggattcggtcctgggctgggccagacatgacccagggggaaaccaaagaactgtaaggcgcaccaatgccaatacagcggaccaaaccagcgaggtggccgcaacaaaagcaggggaggtcccgaggctgaacaaagcgcattttagtttaggcctaagccgggcagggcgcaccgtgcgtgcaggaaaaatagtgccgccaggcttgttgcgtggttaaaaacgtaagttcagaaaggggaactatctgtatgggaggcgagtcgccgtggaagcgtttatggcgaaccttgaatgaagaagttgttacttttcatcgagcattcggatcatgttggtatgcaaactcgttttcgacacgttatttcaaactaaataataccggtcgctgacatagtaaatacatccaagagtcacggagagtctctacaggcgacaaattcacttgcctccaaaacgcggactataccctcgtgggtcgcatacggaactttgactcaatggaatcggatttggtcaagaccacggattggccgtccatagagacctctgttcttgcaaaatttagtagattcaagacaaatgggcttgccctcggcgtaatctacgcttatcaaacttgacgagtgatacggtttgaaacaaacattagcaatgatcccacgacttgtcggataccggggggcggtgaggacgataccgagtttttgtttgatgcgattgcaaatgttgacaatcgtaattaacaaggacctgggggaggaattatgccatagattaaagggtgacgtacaaggtggctttacgttgcaccgtgatgggccgcacgaacgatcaggtaaccgccacctttcttcccccagtttgattgcatcgtcctatatgcaccgttgcgctagacattaagcatctccgtcggaatacccatccgagaacagtgtcaagtgctcgtatgtactaaagacgcgccccccgtctataaaaggcttgttcgttggacgttatcacttaaacgcacgagtgctgccagctgacaattcggcccttcaaaccctgatgcggtactatccttttatgatccagtaaaccatttccagactctcagcgagtggtagcagactttctgcacaccttgtctcaagacacatctgcgagctaggtcaggtgacacgctctggagatttgcgcaactacagccgttttcaactatgactttccgtaacgttgtgaaaaacgaaaactagccccaggagtcaggcgtccaaggcttaccttatggtaaagccacatcgtttccgctcctgaaaagcggtgccgcgtaccctggccacgagtaacgtgctgtacccagggcagttattacacgtgagccgttcgactggcccaccgccgtcgccgtacgtatcccgttttgcgtggacccaatgacccgagcgacgatgctcgtatcacctaatctgtcaatacgcggttagtcgtgcagaactacctcggtgacatactcacggatgtgcattgagccatcgataccactatatcacaaggcgaagtaatcttccaagaatagactgcgacggttcctacgaagccttatgcatcagcaaggcttcagtgccgtagtcgactgcgaacctaagaggtggcttatggtcgccacagacagggcccgtactcgcgggccgggagactatcgacccaagagttattgcatcaaatagcgggtcgtccctggggtgctacaatcgatgacatcacggttagacggacaccttgattcttaactattacttatgggccagccctattttggggttacacactggtaaggcttgttcgtatgtggacagcacaacgtaaggggaaagtgccgtccacgcgaccggtctagcgcgcatatatcgttatgtctatcgcatcactagcaaacctgtttgtcggggctcctgctttgggctcctcgtgctagtgcgcggtatcaaatttagattttaatgtagtcttagctaccgccctcatgtgcggttgagtggcctacctgctgtcggacgtattgtcaatttgctggggtgagataactgctggcagagatttgcatactcgaccccttaagttattcgtgcgcgcggcggacagcatagtccttacagaaggagtgtcgatggctgcaagttctaagttctttgttttcaccttccagttaatatatagtaaagggaggcaaccccgtcgttcctcagcgaagggtatgccgagtaggcttcgcatgtggaaggtaacaatattaataacgacaaaccacgtccttggcctctcgcgggcaacccgggtctcaggtttggtcactgccaccacgtaatttacgctgggcgtgacgagacttagactgttattacatccgcgtatgatagagctacagcctgccgagcgacctggaaaatttatgtgcaaatggtatgtccgaaacttgctcgcagcgagttgttatcgcgtcctaattcggacgaaccgaggttacagcgcaataagggggtcctagcaggtgtaggcgggaacccccctggataccttcggggcagaatgccagtgtgctaaagcaagtgaggcaccaagtagaagtagcagtgatctgaagcgcatccttcatacaacaggatttattaaccggtacggtaaaattaatcattcagctgggccgtattttggacgtagcgttgatgtaatctcgtgagacctgcgagggtattgtctgtacaaaaaccggaaaccactaggtggagctttggtgccgtctaaccaatgcagctggcaagcgcagtcctagcagaagcggtttacgagagcattgttacgtgacccggctaatgacgtacaggtcagacggtggcccagcagccagatggagtgctgcgcccgtgtgagtggacggtactaggggcggaatgataacccccttttttcgataggtgtcgtcgtcactggagaaagcgagccgtaatccgtgtgcagcgtcacgcaacgctcgctgctcctcccgacagtttaccgttccccttgattatggtctgtgactccttgctggtatggagacggactcccgtgcacgatgttctacaggccgcaatcgctgcccggcgcgctttcctacacctccccgtactcttctcgcgcgcacctgggcgtgcacagaagaaagcacccggtacagcctcatccgagtgctaaatagtcctagtggggctgtggcgtcgcagcgcgccatctggttaatgggcgggaaggaagagttattcccttgtttgaacaaaacgtcaccgtaagaacctaattacaatatactttctcttaatcatatagtactgcttcctaaagtgtaactagatagtcgaagagc

SEQ ID NO: 151 - DNA, 1838 bp, synthetic construct
  misc_feature 1..1838: note = Standard
  source 1..1838: mol_type = other DNA
gctcttcgatgcaagtattaaaaggaagacttacgtaagtgtgcttatgttctaggacgatgaaccgtcgttcgccgcttattggcagttatacactggaggcagagagtcgaaagaagggtcagggatggtgggtaacataacaaagagggatttcaatacaccagcagggcgttaccaatgtaattccaccttgccgtacaactgctagattcttgtttagttaatcctgcgtgcccgcggagtgagaatgactggggttgggtccccgcttcattccgggtggagtgctgttaggaataggtaatatgagaacgtgtgaaatttatagccggaagagacagaactttgtaaacggggacgatattaccaaatatagcacaaggataacccaagaatacagttagcttacggcacgaaaagaagactcaaaatagaactgaaggtggggtagcatcgttcgcagggatgtcaatgttctccgtaaagtcaacagaaagtgaagagtaatcgttatgaaaacggaatgaactaagcaataaatcatgttccctgctagttaatagagtcaggggaaaaagctgctgtgctcataaaatacaaaattcttcggtacttggccattggttggtttgcggacttcttgacttccgacgactgaagaactaacgcgtaccgccagagcattggaagcggaaaagtcgatagcaagactggatggcttgcataatttttcccccatgtcgcgattgtcgcaaatccttacggctgcttctaatcagtggggtttgtttctttgcccctgagtgcccgcgtattccgattgggagtttttctaccacacggcgtctcaagtggtgagagaaacggaagtataggatttttacccacgctgggtctttcggattggcccgcttgcacatagtttcgttaaaattacacgcagtcgtgaagttgttgcttcgatcctgaaatgtcgcctagttccacggggccttgggaatgtattgtcgcgcctgatggaagcctacaatgtggcgaacccgcattgataccagagtaagtgactttcgtacaatactctcttgcgtcttctgagtttcgcccttgtatgcctggctatacgcgtttttcctctttctttcccattgggccaatcggctaaggtacggtactcgcagagattgggtgtgagtcgcgaatgccactgccttttcctgaggtcttggtgacatgtgacagtgtaggttagggccaggtcggtactgatgtctggcttaggatttgatagtgctctggccttgccaaagtaatttatattttcgagcggctaagacctacggcaacggggattccgcggggatggttacttactgcaatagtaaggcttagtgtacgaggcccttttttagtgtatcacgtaaaacaagctgttttacgtacagaggtagtgataacaagcaagattaataccagtgctgtggctgtgttaatcagtaggagttggtacggacagggattcacttttacgaaatggggcgggatcacatagagtctatcgcgtagtgtatggaaaacaatacaattaccctcaatcggcatattattgaagtcatatacgtaagctacagttggcgggatgtaagagaccggtgattattgatttctcgatagcgtcccgtaggattatcagatgcactaggaccttaacttctcactcctagaattaggctgaggataaatggacgtgttgattttatctcatacccagtcatttgggaaccttatggcatataagtgattaagtgtacggggatacaagctattgatggaagagc

SEQ ID NO: 152 - DNA, 2188 bp, synthetic construct
  misc_feature 1..2188: note = Standard
  source 1..2188: mol_type = other DNA
gctcttcatgagtaattaagcgtattttctaggaatgttacgtgttggattacgaaatcaaagggtttcttaatatagcctacagtgaataagacgttaaagtatgaaaataagagaaatgatttgatgcgtccggacaagtaaagatgaaaaaagttaaaagattgtctgttacactaaataagaagaagttgatagtaatttgtgtgataaatgaaaaagttgagcgtagtgaattaaattgtatgaaggaatattaaagtgttaagaaagaaatccagtgagtaatgtagaaaataaaagtataaaagataaaagagagtgttaaaatttgtcctagaattagaatttatctcgcgataaattaatataagaatatgtattgataggatatattacaatgagattaaagttgatttaaagtacataaagtatatagaaaagttaaaatgaatttaaaggtaattaaatattaaaaatgtagtggagttttaatttgaggcattaaattgtaaacgaatagaaacggtaatatgataagataaggaaataaattgggggtagtaataaattaccaaaaagaattaatacgttagagaatgaaaaaaaaaaagtaagaaatgattcgaatcagagaggtatttgaattgtggtgaaaaatctatacattatataatgggaaataacaggacaaaccagttgaaatagaagaaagaatcataactaaaaaaagaataatgagttttttgctaaagggagctttcggattttaaaagaagacgatatgataagaaataactgatgatacgaatatataagcaatatgtatcaagtgtattagttgacatatagaagaggtaaataaaaaacatagaataaaggaagtaaataaaacgtgtatatatacacttaataaaaaagaagttgcgagataaaggccaaagtaaaaattaaaattgtagctaaataacggagaaaaaaataaattcaaaaattttcaatatatttagactcaatgttcatttttttatactatttgttgatttgcagacagtcttcctaaacatcagttaccgacatgcttttagaagtaatattagataagatcagttaaactctatatataatcaagatttaaatcgtagatgagagttagtgcatgttaatttattgttaggaattgttaagttatgaataacatagcgaaacctgagcatcgtgggatagattttagattatagattactattaatataaatgaaccagtgattattaagtatcgattacatctttatataactcattactattctgaatagatggaaatcagatttccttggaaacttgtacaagtacatttagacttaagaggcgaaaaaagagctacgtcgtaaaataaaatgtaaggatttaaaacaatagactttactatataagtttaagagagaacgataaaaataacgagaggtaaaaagtatataagattgcaagctagaatttgtcgtaagtgcatattgcgtgagtaaaatttaaaatgaagtgaccagttttcgaactatgaggagatgaagcatagataaactaaatatcttaaaccggtagaaaaaaaggtgagggtctaaataatgatttataaaataggtcaggaacgaagtcaggaataagttaagtacagacagataaacagatatatacaatagccatcggaaaactagaggacaagtatcctaacttcaacaggaagcaatacgaatgccagtatgtttcataatgaatcgttcgcatcttcttatagttatggttgttgtaggtatacttagtatatttattacatgaattgaacaatatgcataggtattaatttttcagagatattgcttgccatttaactctttaaatttatttttgagtacgccttggtctacttgccaaggaacaaacggaattttcgccttgaagggtaaaagagaggttgcctgagatgcctagataattttgtaaagatcaatagaaaacaataatatatactatttaagactgttaatctgtacgatttgggtaaagagactaaaaactgacaaagatataaatgtatggtatagttaaatctgaaaatataattaataatggcaaggtgccgataatatctgtaatcagaacgttacctagtaaaaccagaaagaagagc

SEQ ID NO: 153 - DNA, 1152 bp, synthetic construct
  misc_feature 1..1152: note = Standard
  source 1..1152: mol_type = other DNA
gctcttcagcgaggggtaaatttagcataggttggctgacgctgcgtgtgtcggctagagcgcggctcacgccccagttgtgccctgaaagccgttacacttattgccgtcgtggcaacgtaacctggcttgcattgcagcctctaggctgtgtatgttagaccttcgttgcgttgtgggctctcgcgtaacaggaagacatgttcacgtacccaataaactcgcatcgtttcggtccctcccgaggatcggtatcattggtcggagcgtggctatcacagtagtcgcagggtatgactggtaaacctagcgaagcaccttccatggaagtgccgggtgtcttaaaagcggtgtccgctttatgaggcaacgattggcccttcgactctgaaaggttgaagtactggtcgctaatggcacttgcctcatagttctacccgaggatggtgacgccgttccgagacgcttactttggtacttggtgcagctggctggtgcttaatacgggcgcatgttgggccgtaatttgcgcgttggagcccaagcctaacttggaatggaatatgagggggcttgtccgggtttagaggcgtgcggtggtgacccaggggctcccccgtatcgtgcccacaagacttgtgattcgagcttatatcccaatttttttcctcccatcaggtcttggtcggactcaagcgggaatttgattccgcgtcatagtgctttggagtagtacaaaaacaaaaggaagtggcggaagacagccggaagggttcatcttcataagagcgctacacccagcacccttgtggtccgcagtttactgctgggggccgtacttttgaggtctggcaaactagcctgtgggagagggtcttggcgttactgtagtcttaggttttcaccggcaggtctagtagcgtgtaccggctcagggataatgccttccgctgaggtatgtgaaaacctgaggggtcaactccctgtgctgggtgaccttacgagtgatggggactgactgtcgtccgagatcgataaccaccgtcagagctatacggtatagggcgtgctgacctaccatagcgggttgagtctacgcctagaaagccctggcggctgatttctagctcgttcttgattttgctgaagagc

SEQ ID NO: 154 - DNA, 5197 bp, synthetic construct
  misc_feature 1..5197: note = Standard
  source 1..5197: mol_type = other DNA
gctcttcgcgctcgtgagcgccctgaggactaggcgtccgccgtagttgggcgcgtacgaggcgctcgcctcccgtgttgtcccgccgtcagcggatggccccgcgggctcgcccgcggacggcgttctcgaggggctcctgtctctcgcaactcagaccgtccgggtccgcgcctgtgtccctccttacgtgatccacccggcaacgcgtagggcgggatggcggtcggcggcatcggacggtggcatacatgctgggggttgcggtctagtgctctggaactaccgccaggtgtgttaggccccgctggcgtttcccccctgtgtatgtctgtaccccgtcgaccatctacccacccctcgactgccgcgcagcaggggacgcgcccttcgtgtgggtgccgcccgatcacgctacgagccgcaccgcgaggagagcgaaatgggccgccgcggaagttagcggggcgccggcccctgctctttggtcgcgggagcccgagactcgcggcggccgcgggcaggaatgccccgccccgggacgggaagccctgtgggggcgtcaggctcgtcaactagctcccgccgggggcagcggagaacgactggcctgcgggacatctacctcctgccgccgggaatcggcgccagtccggggcccgctttgatggcctccccgcgacgcggccacgacaccccccggccgccttgaagtttcggcggaccgggcggccgaccgccgcctcccccctggactgacgatggccagcgggcgacaggggcagtctggcccgcgctttgctcggaccgaccacggggtctgcgtcgggaccccagaggcatcggcactacgggtcgcgaggggtggcagccgcgactgacgccgtctggggcccaggcgggttgcagtcgttaaccgccaagttcgctgacacggtggataataggcaggcccgtcgggtcatcgtcaggcccgccgccctcgcggcgccggaggatgacgtgcggctcgggcgcgcgctgggtcggaccccggggctctagggtcgggcgaccccccttcgggatgatccggatttacgtccacagcagggccccgggctcggcactggcggcgggcgactgcccaaccacccctgcgcgtacgcgcagcaccgtcgtttgcgggaggccgctggaagggtgcttcggaggggccgccggctgccccccgggacctggcgggccgtgccgagctgggtccggatggcgggcggggacgaacagtaagaggatgcctcccgagcgacgcgggatcgtgcctgtgcgcatcgcagcgacccggcgccagcggcgcgcttgaccgccgaccctcctttgcctgagccgggcgcggcgagccgattcagcatggcaacatcgtgtccagcatggccggggccggcgcccggtgcaccggcgggacggctgatgtgcaggggtcgcgtcagtcggccttcagccccgctggtatacatggactgcacgcgctgagggaagacgattaggcctggcctgtcgacgccctctacgagggtggccgcatccggatcggggacgacgagcgtcgctcggcgcgcggagtggggccttagagaccccgcgcctcttcccgcggtccccaggctccccgatacgggcgccaggcaggaactattgcccggaggggtgccccggcgccccgccccgcgcatcgattcaagtcgctgagtgatgcgcacttgatggggtggcaaggcgaggcggtcgcgctcagcgtggacgtgagtttgatgtccccgcgaggggtcgtgccgctgccgccttgtacgagcgttatgcgcgtgccccaccccagttacaggtggttggagggcacctatcgcgttacgctcgcggtcgttatacgtcggggactccccggcgagggcagggcgcgctgcgccggggctgtttaaaggctgggtaggggggggctcacggcagcggaaagctggggctcggtcacgccccgcttaggcctgtggggacagcgcaacggcttctcgtaaactacaccagtcagacacgacgggccggctcgcgccggcgtcggactggtcgatgcttcacccgccggcggatctagtcgcccgcacatccgccgagtcctcccgggggttggcggctcctgcatcccgtaatccgcataggttcgtttcgaccgcccgttttctacgtttccggagccaacgagatgcctcgtgcttgtgggtgggtcgggggtgcagcgagttgtcgcgcccagtaactcctgtcggggggtcggtgcagcggtcgagaatgtacatagtgtataccgcgttttcttgtgggcgggtcttagtggcgagtcgcctcaggggggaggggacaagtcgatgtatggtccgcgtcgcgtacagggcggttgcagggctcactcgcggccggggttgaataacagcaggagccgctggccggggtatcgctcatcgagggcttcacccggtgttcggcggtctggttcatcccgcgctcgcaccgagcggttagtgactgatgtccatgcgcgcttgccggggcccaacgcgagggtctgaatgttcgcggccctctgactaaggcaggggggcgatgcgcgcgttcatatgggagtaacctacggcgcaggtggtggcgtgtcggcgctgggtgcttcggcgtcaccaaccgacgggcgacggccggggttcaggggcggcgtacagtgcggatagtaacgttcgtcgccggggggcacaagatccgactcctatggcccgtcggggtggtcccttgcgacgtagtctcgaggcaggaagggcgtggcccgacttctgtccgtgcgctcgcctggcggggaggatcggtgcgacgaggaacgcgtgtgctggtggagcgcgcgggaaagatcgcacaacggggtgctggagcgacggggagcctggaagctctcgaacatgttggagccagcgcacactaaatcgatggttaggcgtagttgtcgcacatggccgcagcggctcggggggtgagacagatacagtgagcggggcgcgcgcgacccagggagcggcgggcctgggaaggcggcgtcgtggatcagctgtggcgtacagcgacctgctggacccggtggtgctgtcctatctgggttccccgggttgccttgtgttcaccggtccgtgccagctgtaaaccgcgaagaccaggtgggagaggcggaggcaaagcaggtggtgtgaggagacttgaggcgcgggagtacgccgccgtcccgcgccgggggcatcaggtaacggagccctatacttcggtgtactgcaccggaagggtgtggtcccgcccgatgttaacgagaggctggcgtggtcctggccgctcgccacatcagcatctccgtcaaggagagaatggagaccggtgaaaccacgtcaacagaagctgagtggtaagggtttctataaaagggaggtgctgctaacgtcgcgggttgtgcgcccgttgctccgggggagggacggctgctcggggccgacaaagtacggaccgagatggccttaaggcgttgcgacagctcaagaccgtggcttcggtttggggccgagggcgccctgccgccagggcccgcggcccgtatgcggctcaggggattccccggcgcctcaggctacccgtgcgcaggccaagcgagtgccgcccctgggcaccaccacccgagcagaacgataggtccaccttcacggaggtccctcgggagcgattccgcccgagcgggtgagttggcggtcggcgtaaccgccaccggctaaggtccccctgcttctaggccgccggctagacggcgaattgtcgtgccgcacgtgtccgcagcggctcggatgtccacggggatcgaccgtggtgcccggcttagttgcccatgcagaaagagggcgggagaattggaggctcagccctgcacccgcgaccgccagtcgaccagcgagcggctcgatcctgcctgatggtggccgtcgccgctcatgccgacggcccacgctgtaattgctcgacccccactcggtctcctcaggatcggacgcccctctccgacatcccagccgcccggtaggattccccggcggcggtcacggggcaagtcgcggggattcgtggagggccctccagcgtgctcggccgagggtcggcgactcgcgcacctgagccctttccctggcgccgaccctggcagtcgtcgggccgggagccggtaggtaaatgacgcaagggcgcgggctgtatgcccctccgtaagacgttttgtcgccttcctccgccgcgcccgtcgaaacggggccaaagcggcctgaagcgaggcgtcgtccggccactcatgtcgggcttcgcagccattaacgatgtgcccgcgatccggatctctccgtcgggggctacgtgcggaacgggctatgcgtcgtcggcgccggtcccctgaaagaccataatgtttcaccgctggccgttcctggctgaagcgtagatgcgcccctggcgacccggtggcccaggcccgggagacgccccggtccccgctagtccccaatgtggcccgcggcagcgggtgctggcgcgttgcgacgatgccgtggcaggccttggggcacgcctccttgactgtgagaccgactgcctgatgcgccgcgggtctcgtggcggggccgcgcgaggcaagcgcgctcggaggccgtacattggtagtgtcccccccctccacgccgattgcggcacggcggcgggtggcgcccagcaccagggcgggacatgccgacgctgcgggttggttgctcgcgacccgcgccgggccggagtggcaggcgtcagataagagggcaggcccctcacgtcggccgtaccgcggtgccgctgcgttcgcggccagggcgaccacaggcccggtacacttgcgggtgggtgcccatagccgtaagttaccgcggcgccacgacctgtcggcggcgcggacagctggccaaggcccatcacatcctccggcgagggcccatgggtcggacggcgggttagacctggagcgggaggccgctcccggagtccgagtggtgatgcccccggacaatgcgccccgcggcggtagcgggggccggggggggactcccgcggggccaggtggatcgagaagagc

SEQ ID NO: 155 - DNA, 1709 bp, synthetic construct
  misc_feature 1..1709: note = Standard
  source 1..1709: mol_type = other DNA
gctcttccggcatcgcagttcctgttaacggcatcgaagcgcccgcccccgagcaattgatgctaggccagatcctggtgcgtgcgcctaactgccgcggaactggtctgtgatgccctgattaatcgtcagtgagtcttggcgcaagggataggagggctggacacgtaacgtggggaggcgcctggtacttgttgttcaccgcccgactccggccatacttaccggacgaatctgaagtcggagggatgccgcatatcatccatgcacggagacggtctctccggacactctacggacgctgggtccaccggtgacgccgagtcgtatatcaggacccggaggtttccagtctccaggtcccagggcactaagcgattcgcccgcgctcagggcggattggactgccaaatcaccgaccggaagacgcgacatggcgtgacaggtcctggtcgaggcggaacggtcaataggactaagcgttccagcacgatccgaggtcaaagcagaggttgtgtgtcgtacgactccgaacgcgacccctgggatcggcaaggcgtgcaatgtgaggataagactggcttgtcgtggaatccaagggatcggaggcggcggggcgaaacgaggtaattgtttgtagttgcgtcaccgaaggggtatcctgctcaaaggtgcagacagggtgcgttagagtagcgtggggatttgaagccgggcaggtggccgtggaaagtcttacgcctccattaaacggcaaaggcgccccggtggtcaaagccgggggacttcaacctttctggggctctcgcgcctgcgtggagaagcccttcgatgacgtaagtgcgcgacaaacgacaggtgggctggaaactggggcaagacaagggaacgggcggacatgcacacgatgtgacgactataagctaggtggacggccgagaatgagtcgattcctgagcggaggcaagcggccaccgaggaccatggtctcgttcagccaccctcgtatcggggcttgagtgagtcccgtgccgccgtgcgatttcagcaacggcacactcccgaagccaggtcgagccccgccttgagctacttgtgccaatagccggactcaccagtttgtccgatctattcgccgggggggctaaaccgtatggaggccccctacgatgtttcggacgaagccgtcgctcggcgtagacgcccgctgatcggcagatgccagaacccactcgttgtcgtgccattggaccacatgttttcgtaccaacgttccgggggcgcattcggatattgataggcctttgcgactgcgacctatgcgctggtctcccccgatacccatgtccgtccttcccgcgagacgttagaaggcgtcgtgcctcgcgcctgcgacgggttctgactcgtcgcagacgacgtttgaaacccaccatactagccccctggccaacttctttctgtcgctacctgcgcggggcagactcaaccttaacgccgcccgcctattggtctagctcgttgacctgagtcccgttgggcctaagctcacgggctgagcctctgcctccgggttgccgggtcttcgatccctctgaagccgacttaggtatctataggatatccgctgcacggcggtgtaccggggtcagttcgggactcagtcgtccagtgaggcgcctcggcggagaaacagtcacgggaagagc

SEQ ID NO: 156 - DNA, 1944 bp, synthetic construct
  misc_feature 1..1944: note = Standard
  source 1..1944: mol_type = other DNA
gctcttcgtctgtacttggagaaatgtcagtcctctgatcttgtttcatttcgttttgtttcggcttcgatgttttttacagttggtgttcacttcaatattggtttatgagcttttaagagtgttgtacaccacttacccacagtaacgtgtttcctatcagcttgagcccccattatagccatgcaatcacatactatctgctggttcggtggcacagacaacgtgaaaaaaaaaggaaacatagatagtcggtttttcccgtcagtcgtacaagattggcagaaggcacgtagttattccttattaagccttgggcagttcgttatggagttaccgttcactaaggtaaaaaaagccaggttagcgctttgtactctcacagcctttttattattttatagtccctggtcgcgggttgcttatccctaaacggttagtgcgaaggttatcttccctgtatggtcgtatgttggtaacataatgacctgtttaagtgatgcccattcaggtttgtcgaatttctgccatcgagagtgtaaaagaggcaaaagtcttatattaggaatgaattaataagtcgggctgagggtatattaatttcttggatttcatctacgtctggatttactgtcttatatcgtcaagcatgttttagggggtaataacaattaaagtaatttaatgcctcccgtttcttctatccttattagtaaacctagtccatctgtatacttatatgttgaactaacaattaaatgttagagttcttgatttggtgcattagcggaatctatcccgaaaaattttagttttctcttggatagaagaagtcagttatttggagtacctcgggcatttctttttacagatttgacgttcagacattagagtacattcagtccgtgtctttccttatatagaatgggtgttctacagccatggaaatagttcttctgggaattgagctattctgtgtactttcttccccctactttattttctccattttatatcctcataatcaaccaggttaaggggagaagcacttttaaatttataatatgaaaggacaccttggtggacttatcctctttcatggtataattacaatttattatatgcttttcctactgtgtttggctgacctatatggagacataaggttttaggtcctctttgagccttgtatcccttcataggtgcatcttagaattatttattagtgaggttagaaaaatcgggcgcagaatatatatcgtttaataggactttatctgttctttcaatgctgactattcaatattcatcgtcgtttaattggcccttattatattttatgggatctccaaatttttcgcatggttaaccggatttggtcttaccagaacagtatcgattgtttcgcgtgttttggcgaactaatgatttgtgcgtttgcaaattattactgtcggtttaataatcttaaaatttctattattctgatactctaacgtaaggtagattggcaagaagaaggattgatagtgattgaatgtggtcaagagtctaagagtcgtgttagcgtcataaagcaagatgttgagtcaatggctgatcgggttacgaattatcttacgatatgagctaagtaagtttaggtcgttttacaggagagatagtaaacgacgactgcatgtctaatgagttcctatctaaaaaagccctaagtgaactagagatgtcggaagtgaacgggatgaatatcagtctgataaaaaaggggacgtttgggaatcaaaaataggttagttgggcatttgagatttaaattaagtctggacagccaaatcatgtaggatcttaatctatgaatgtcaatgttaagtgataagataacaccactcgcattgttgttgacgtcgtataaactcatatagatgtacagtcatggagaagagc

SEQ ID NO: 157 - DNA, 2586 bp, synthetic construct
  misc_feature 1..2586: note = Standard
  source 1..2586: mol_type = other DNA
gctcttctaccctctaacatctgacgtagtgctaaacccttgttagctaacctcacgaacctatcctcaccttcttaattcttcattagttgccacaaagagtattttgcttcattttctagtcgctggcgctgatcgcgtagattggaagaggtgcattttgccttattctttggtgtttaggcccaagaccgactacaacgcagcttatgccaattgtggcagaatatttacgggtccttattagtaatcttctatattttgtggcgcggatagtaagggagtactaattgtcgtgctttttttctcaattcttaagctacggcctctgctatgcttgtacggacacgcgttcaatgtacgtcgaacggtaggttttaaaagtgttgatataaaaggaaccaataggaggaaaggtcagaatcgcacataaagtaaaagaagacatgtgtgttacatattctccggagattttagtagaacatgtgaagtgtcagaattagccgtgaacttgttgggtatcgtcccctacccacgtgcatttttagtccatgacttatcccttttattctttttatctttcaagcaggtgccagataaggttaggtgattcacctctgactttgataaactaattaatttgcttgctaccgtctcctctcatagcgtgtcctacttttacaccacaaaaacagaacgtgaaagatcgttagaaatcccagtataaagcagctccccgcattccaactactatcgtcctcgagtgctggtaatgcgcatcggatcttcaggtaacctagctaagggtatccatactcggtggatctattataagatgaggatacacatccaatgccaaacagaaatacatgcctcagattgtggctcatcgttcgcgcgcaattagtaacataaaagattagtccagcaagcaagacgaagccctactctagtcattgctcatcacaaacatgtaaacgtgaacctttacccaacctaacggaacaaatacagaaaggatcttagcctgaatatactgtactattcgctgtaggctaattataaacagacacgctcgcagcaagatataatcgaatcaatcagtcattaatatagaaaaactttcggacctcgttggactaaacatgttctcaacggaagtccatgccttcgggatactaatatctcccagccgcatacggacagtttagtaagtcatggcaagcatattcgaacaactacgccagatataaacctggtgctcggtcaacatcgagctaattaggttagcgcaacgtacaagcaatggatatttaacctaagtccctccggcattttgctaagatcaaagacacctggccgacgatacgtgaccattaacgagctgccttttaatgatggcaatcgccaggatagcttaacgcccacggatatatgcaatctgagcccgactcaaagattcccacagagcaggtacgtttttctccaagaaatagaaccagatacaaggtcccaagttccaaacgctcggatgaatctccatatgtatgctaagccgtggtacacgtctgacagagtctgagttgcacataaaatacacgtcaggacacttcaaatacttgtcgccgcaggctccgtcatcagacggaaaagtaccacgacatgttcaaaagcctgccatctctacagcctaaagagtcgctgggcttataaagcccacgtcacctcggttgaaaattccgaaaatacgacattacgataaatagaagtacatgtgttcacccgcagagttaccaagtgcacgtatcgacacaaatgaaacacctagagtccgaacaataccaactggatttgaggagccgcgtaaagagcagatggaatgagaaaggtgtatccctaagctcaaacaacttcttaacgagagaaacagtttaggtatttagtttcacaatacctccagtcgaaagggcaccagtccatacatatgcccccccatgaaattgacatttactcaccagacgagaaaaaaaaaacgcgaaacaaaaaccatacgcctatcgaatctctactacatcatgaaaatcctgtgcgtttctacgccgtcgttgttgggtctgtgcactcatcttatggcgcccggccgaatgtcttaggtccgctgcctcttagacattgatttgcacccgttactttattccatgttaccgaaccggtgacacctataggaaaagataccctacctcaactgctgcacaatgcagatgctaggccatctaaccttctcacgtgtaataacccccggtccaacccccgttcctccgccttccaattcctttacagggtaaaaccggaatcagtctgacccgcttaaattcgtgatctataacagggatcatggtcggactccagttgtcaattcccctgatggtttcctcccaccggaagggtcccatcttcgcgagaacctatcagcatcacgtcccgggaatgttaggcctggtaagctacttcaagaaagatgtaaatgtgtggtgcgagacatatccctttgtacagtagactacgagactgcctcctaggaagagc

SEQ ID NO: 158 - DNA, 6274 bp, synthetic construct
  misc_feature 1..6274: note = Standard
  source 1..6274: mol_type = other DNA
gctcttcggggagcttacatgaacaatcaaaggggctttgcaaccaagtttacagggtgcctttaaaatatgatggggtaataggcaattcctacagattgaaggatattcaagattggaaaaactgaatcaaaaggccctcctattgatgaaactcatgctgcctgacggggacaaagagaagacgaactagccaatggagacgttgaatactcatgcatgggaatacgctgtctgcccaaggagtaacaccactaccctcgtatgcgtgtgtactggcacgtaccggaaagtttatgtctaaactatagttgactaacaaatcagagtctatgaatctagtgatctattgcgataaatgagctgcgtgtacaagatgtccgatatgatgagagcaagatcgtccctagagtcatgtctgatttccgcgtcagtattgcagtacattaagtatgggaaggagcatgtttttgatgatcgatcattttgccaggcgtgtgtctgctaaatgatttcgaacccggggttcaattaccacggttaggtaaaatatagaatttctcaagttgttatgaacggggagaaccaattgtatctgccctaaccgtcaagcgctcgctttataggcattccagttaatgagcaaaggtgatgccctctcagtgtggtgagctgtagttagttaggctgcgaccgtttaatgattagtaatatggaagattctccttacactggagtgtgctaccagttcggcataaatagtaggccctttaatgtggtaaaagacatgattagcgtactgtcatctctacgagcatagaacttagggttggcgttcgtccattcgtaagagtgaaaagggtagggttatataatgacgcgtgtacataaggctaactcatagagcataagtagaagagatgaggctagtatacgaaattgtatgctaaggagccaatcataacaaaagttgactcagataactctgggtcaaagcccagacctggatagagtacgagatagaatgaagatcacagggaggaatagggtcataacgcaatatacaaactatagacttctggcgaagttgcacaagtgtaagagtatcctctaagtgggagtttcatagtagagagttggatagatagctgagacaatattacttcctcatagtgtaaagaaacaacaaacaagacaaagattgaatggacgcttagcttgcggtggtctaccgtatttgccctttcttgcggggagtccagccatagttcagggctagtagacagccgagagtagaaccacaactggagaacaaccagtagcataaaaatcataaaaatcagggactgaagcggacaaaaggaacacgaagtaaaatccagttgtcgcatagatgttctcagcgcgtgcatccgccaggacacagaggtagtatcagcagtggattttggagtaggtatctatcaacgctatgacatgtagattggtgttgttctttcaaatgaaaacagcactaggcggtaatgcaacactgagccaaagtgttttaggagaatttggttgtttatgggccctatatctggtaagattggtgtacccacagtaaggggctcaggacaatcttaatccataagggcaatgaccaaagcgttacaatcacctatttgcggggtcattcctagtaattcataggctctgtgtgtgacttgtttaggatgcagtctgacggggactcttaagaggggtaattgtatcaaaagtagtccgtcgcgggaacttaacatgtttggcacatacgaaaacgttattactgggggtactgatactccgggaattgtaattccacgaaatgtcttaaccataacctatttagtccagttttcagcatctacgagctttacaggcgaatttttagccaaatatcatgaccctgaaacttaagcgtaccattacgttggcagttatcggacgagtaaaggatatcgcagaaggcatctgaatggatattcggtgttgatttttatgatggcgaaaagggcagcatggatggttgaaacttaggagggatcacatactcacgatgttacaatcaaatgacatgagcttagcaatattttcaggtatttatcgtcaagctactccgctgctgtgagaacttatacttccgttcattggatagcagtaatttcgactggctacgcttaatgactccttacaggattgtgctccttattaaaggtttattcgcgaccgggaaaatgtcacggattatctaacacgcaggttagttaactgcgagtggctgctggtgatatgatcgtatttataaatacatacttaaccggtcgtcctcttcgttatcttgggacgaaatactgcacttggagaggactgatggacgagtattaaggaacaatatcattgacgttagtcagtcgcaactaatatccagaagttcgtagcaaggaggtcgcctcaatggagacttatacaatacatttcaaagattgcttaaggggcgaaacgcttattgcgtggaaagtcaaatttatttatggagttataatgaagagggatatacggcgaagtatcccgcacaagtattagattgcagtacaatcacagaagtcggatgcgtttctgaggtctgaaaaaggaagtaagtaaggagtaaagtggtgagtaaaaccgacagtcgttaataatgcagcttgcggatgataacacgggcgctcgattccacatctctctaagtttattctggaccgctctgttgaaataagacttaacatcaatcttgatgggcagagtagacagaaaaggcgcagcagccgaaatcgacaacaaccagagaagaacacctgagacacgaagatgataaaatgttattaagatgttagttagggaattgtcatttaacaatgacgtgatttataagacaaccaccttcctaagaagagtactggaataacagaagggcgtgaaagggagacaggaattgatggactacgcggcgtgatagatcaaaatgcctgtcgaagaaatcgtaaatgtatcagctgtggtgtagcagctcgcgccaagcaggggaagataaaccagctcttgttggtaggctatcctagagttatttcagataattgctctaatcagttgtcataattttattgttttccgggctgtcaggatcttcgataagaacttacatacttaataggaataagagggaactgtggtcttttatctatctgcgattagccattgcggaatctgatacgatcgatgcattgtatatccgactgaccgtggtagcgtggtagaaaaaagagtcagcacatcaaaggttatatccatgattgttccagcaggagaggtttccggataagagtaaaagtcatcggcgaaggccaccgcgagaggtgatagccccttattttcctaaagagccgtggaatgacatggcgttactcaggtagttggagcttgtcgagcgtttttgtaatgctgatttgccctgaggtccagtggggcactaggttacgccagtaggcgaaagttagatagcaagtagcgacatgcgtggggggacaacctagtaaataaacgtgacgccaggaaaggtcatttagactgtaatcttagtgtcagccgcccctaattgttaactcttagatggacccgatgcgcgctttgccgcatcaatagggaaaatacacctaaacataggccttcatttaaagtatgattggtggcctttgagccctaagttcagctttctcacacgagtgaactttcgttatacccaattgatttccttcttcggttggccgtccgttttctaacagttttaattgctcagcaggaatggacacataggtacacacgagagaagtagttttaaaactaatcacgtgtgatggtgcaacaacagataaggtgcgagccacagctttctcgtagaatcctactgttgactcccgaagtctagcgatggcttactgatatacttacggttgagcagtaggactgttgttacccttgactgaagtgggctacctatttattttgtaacattgcgggtaatagatgctgattactcataatttccaataatccaaccgatggtggtaaagaggaactggataaacatttgcagcacacgtttttactatgactgtgtcttggaaggatagagacgacctgatccgatctctcgcctttgatactcagtaagagcctgagatgatctagctcgtaccatgacagcatttctcgttagcactattacacgactgttacatcatgccctttagaacgtcaaatgttgcgatgagtcggatggcgcgtgacttgggatgaacggtcgacagctggacgtatagatgggactggaagatactgacagcataaatggtccgtaagagggagtaaggagcaataagcggagctaacttgattacaggcgagactccagttaaatctgataacaggtggtatcgtggcctctttgactccgtcctcgtcacttcttgcaattttcatccctagctaagtatgtacgatgcttcaagaggagatatctcacgtgtgggagaatactcttttgtctgtgatattacacggtgggcgctagactgtattaaggctcatgcgacatcttacctccattggttgcgactgaatgctgatggaattgattactaacgggtaaaaaaatgaccggtgcaagtttagcttggttcagccatccgccgcgtgggttttactatccagccctgatggtcgaagatgtgcgttaaagacggttgttgtgaacgcttttagggacggagtttgtcggtgtctgaaacccggaggatgatggaccaattgtatagtatgatggctgtaagtgcgttcggatactgaaacttctggaacaaaatgaaaagcgataatatggggtgagaggacacattcggtatgtcactaatatagttgcgcttctgaggggctatgcccatgtttgattgaaatggaaagaggtactgatatgttatgttcttgaggccctcatctatacatcacgaccttcccagaaaagagttacgcatcgagtacaaacgttaggcaggtaaaggaaaacaactaattataaaaaaaacttacttttaactgataatattccacttaatctactttattaaagtaagtcgttcgtaattaagcattaaatactaacagaaataattgatggatatcattaaaaagttgcttccctttgggagggccttaggatgacctcctcgcgtcttcggtgtgccacgacatggaacatatgttgaattgcacgatgcaaacaatttagaatttccaaaaaggtcgtagaccattaaggcagctgattataggtttccgtcctagatttgatgcgggttcaaatgtaaaattgcacatcacatcggaggaaatggtatgtgcttacctgactagcatcgtgatgaaagcgtatgctcatcgatgcacttagaaattttgggctatggactgaacatgtaacgcacccggactcgcaattaattactgaagcagattatcgtacaggcaggtagcgcctgggaagatcgggaaattaacacgacagttttactgtgtgccacgttaaatactgctgccattatggtattcgtgaattgtggcacgtacattcagtagttcagagggtattcagtatcggtgcgtcctgctatccactcgattttatttcccaactaccctctggatacggacatatagctctatgaatctcttgtatcactgaagtgaccgttcatcagtatagtatcgaaatcgtgggactagaggggcaaataaataggcggctgtatgcagtgtaaggtgttcaaggtttggatctccatgtatgttctcaccttgattctacgtccgcagttatgaccctggccagtccgcagtatcacacgattaagtctccttagagcacgttttaggacgaaatggccgttagacgttcccaagataaaggaagatgcaactttcaagcgtcgacgggcgcggcagatattgaatcgaacaaccatggacagcaaggagtgtttcaatttatgcgcaaactcttctccgtgaatctgaaatccttacgagagtgtcgcataatagaaccaaactgtcatagtgtaggttacacgaaaatcagaactagacacctcacagcccaactatataatgacaagatcgccgccattgggattcaacctatgctatacagaagagc

SEQ ID NO: 159 - DNA, 1659 bp, synthetic construct
  misc_feature 1..1659: note = Standard
  source 1..1659: mol_type = other DNA
gctcttccgattactatgtactaagagtctaatcttatttctccatgtttgcgaaaattttgaagatttactcatcgcatttattgtgttatgctgttattaattataaactaactccatcccaataacaaacagctcaaattgaaaacttaaaaccagagtcatctcagattatcttgaatttttagtgttaagctctccagtattaatactgaatttgagactcgaaggagtggctgcatcacgccggtactcgctagaaactctcggcgccaccggcctgcaagcgaagaccttactagagagtctaagcctaaagcaggaactttgattgcgtctcatatatatgaaaatagaggattaggagaaagctaacggttaaaatttggagttgtgatgctaccaataaaacaagaaatcgcgaaaaatgagtgacgttttagagcttactcatcgatccatacttcctctatcacgagttgcatgataaaaatattttgcttggacagacatagcagtatcaaataattggtgcaattatgatccattcttgctcaatagagctatcgtacgaaacagagttggccaagaataattaacaaagaaagagtacctttgtgatttagcctttaagggaatacttgaagtgtatgcctatgtttgaagtagtttcatgcaaagttcggaccatgatgatgtgatgacaaatgtatcattcatactctcctctccttggcttagtaatggatctagcgggtattgcctgcgatttgaggaatatgtttctgttgtaacagacatttaacttacaataaaccaaacagaatcttaatcttgcgtttttgcggacttacctatcgttgattgcgaatttacacaattaaaagacgttcactacagaatgaatatactaaacttgagattttcacaaacgtttgttcaatgtttaaattaaagtatgctaatactaaaggtagtatgtgataggtgcatgtatttaggtggtatagtctgctatactcacattcatgatagtcgcacttgattattagtcgttttacccttgattggagggagttgataacactaattactctattagatacaaacaagttcagaataattaatgcactgcatggggcatcatgagactaatgcttaattaccggtacggccccttctgcttaatgccatatagcgccaacgattaatactatcttatattatagcgtactactcgaaggatgtaaagaagttgacaacatcaggacgtgctaataaagaatttcttcccaaaaactactcggtccaagttttattacatattaacagtgatagagatataacagggcaaaacaattattgataatcggtcatatcatgacagaaggcattttgtaactagagatgattaacaggtgagtaatagtcgttgctacttaggataagtttcgcttttttcttcaatttggcaatcatagtacatttggataagaatgacggaagtaacactaacttagtaagtgccaccatataattatagttcgcttaaattacatattacccttccaattcatgtgtattttaatcttttgttagcttttcggttatgagatttcaaaataattcatttttttttctaattatttgcagaagagc

SEQ ID NO: 160 - DNA, 3585 bp, synthetic construct
  misc_feature 1..3585: note = Standard
  source 1..3585: mol_type = other DNA
gctcttctttcgacgctgagtgagtcgaagaactctgggtctagtaatggggccagacgtgtccctagctctcgcatttggaaaagtaaatgacgcgtaccccacgaaaagggatttagctcgacgggcaaactggaccaagagggtacttccgggccgtggtccgcctcaactcaaccagcttgcgtacctgcgccctggccgccggaacgcgagcgcacgtggccaggaagcgccggggccggcactagcgcgaggctcgtatcgggttcgcgtcactgccgctcatcgccgatgcatcgctcggaacgggctggttcacaggagtccgtagacatcgctgggctggaagcaaacacggaggttgcgtggataccggcagccacctccgtctccgttgttgctaagcgggtggatgtctcccgctaaggactgcccgagaccgatgtcccgactgatacgtcaactcctgatgaacatccactccccgctactggctccacactcgtcaggggttaggtccaggcggggctgcacttctttcacgcagtccgtcgcgtggagagagcggcggccttcgatccccaacggttgaagggtgcgcgtacggtaggcttaccccttgcgaccccgtttttgcggcgtgggacgtcggggcggccagtaccgcaacgtccgctaacctcgtgggtgacccacagcttcggcgcgtccgatgcccgcagggcaatgcccggcctggaagtcgttgctgctaagggtggggaaggtgcgcctcccgagactcagtccgagacgggcggcctggcgtttcgggacctcatggcggtttaccgagcggcaccgtgagcgtgggcccccagattcaattaccggtggttgggtaggcgatgacgggaccgagacctctcgtcttaccagcggcctcccgcggtcaaactatatctcgcgcgcatctccgggtcacgtggagagcgggcgccggctccgggttcccgccgttttgatcgcgcgcagctccgccacacttgcataggttttcgcccgaatgcgggatcggcaacagagcgcctttgtgacgttccgtggccgccttccgcccccgcgacatgttcgggactgcggagaggtgccccgcggggagtcggaccggacaacctggcggagccgggtcgcgccttagcgtcgcgatgacatggcgcagcggagtgctcctcaaggcaatggagccctggaccacctcgcactcttgaggtggcgttttcatatttggcgtggcctcccaaatggggcagttccggggcggcgggatctcgcccggagcgcggcagtggcccccactgtgatctggccgcgtggcgcctggcggaaagacacgcgcactacgtcggcagccccagctctgtcgacgtgataccccccagcgcacccggaccgtgtgggccgccgttcgcgatggggtcgcccgactcgtgctgtaggtggcctcgcgacaagtggcggggacgatgctagggtgagccgccatgtcccccgtagttcccgcttacgacgcgccctggcccaatgcttaaccccgctcgccctgtggctcagggaagtgttccggcggctggggtctgtggtcaggtcgctgctaggtccaagtagtccttcgcagcaggtacgcggtgtccttgggccgttcgtgtccagttgggggccaggaataacaggagacaggtcccgaagctctcgtgtgtgcgtgggggcagccggggcgcaaagctgcgcaaacgcgcccctagagtagccggaccaccgcccgctgtgccccggcatcttttaccgtagctcaggggtgagttatggccctgcgcggtgagccagcgcgccgggtgaaggtcggcgtcggcggcacctatcttcaggtccgcggcgagcatgtctcagtcggttgcggccggtcgggccctgtcagtgtttccggatggcccggcgctcgggcccgcgcctgcgtagacctgggagagcacactccctccgccgcgtaagggaggagccgaagacggctcgctcccctgtgatgcactgttcccgcaatccccggtagcccctgctgatgccaccggtggggacgctttttgtcgacacctgggcacgagcgcgcgcgctggtgcttacacccctcgcctgattgtaggcccctcgctcccctgtccttttcgctccacctcccccgggacccgagaccctgacggtcgctgcccctagcgtctggcagccccttcttctatggatcgagcttggcgggccccctactttacccggtggaggaactgagcccatttactgatctcagccgcccggactgatattttattatgtttttattgaggaaggctattttaaaacgcgtatagtagaagttcgctatgttgctttgtcgatctgtaacggtgatggcagcagctggcttggggatgtgtggaagtgcgtgaaaacgcgtacttggcgtaatcagtaccgatgtgaagtgacaggcgggagctttacttggtcctcatatacaagacgcaatgggctctcagttatctaaaatggattcaagtgtgaaaactaggtgtttttagggggcgttaatgtataaatcctcctgggatactgtgaaaccggtcgtataaccctcggtgtaagtttagtggtccttgcatatcaggactattcacagagcttcgagtggatgtagaggcgctcgagggtacaaattcctttgtgtacagactgagccgcagcgtctcaggtgagttagagctatggcggttgactgttgggccgacgcgctgccatattagccgggtgggagtgtcaacgcttttcgccgtattagctgaatatgagcgaaaatgtgaaacgcgctccaggttctcggccacaacggtggggccatcgctagtgacagcctgactcctatcgagtgggctctccgacgagatatgcccttggttgccctgtctgggccggcaggggtagcgcagggtaacagaccaaaaattgccgacctcactcctcagcacgcaacaggatgtgttagttactcagccacgcgctctcgacgggtttgcgtaacatagttgccccgacgcccgaaggagagcctcatggttccgctcgcgcgcttggtaggggccgcgtccgggatggaggattcattcggcgaactgccagcgctgttgtgacatcgattcgcgcgtcatagtgaacggtacgagggggggaatctgtttcaacgccggagcgctgcgcgtccggcgcttgcaccttgaccacgcctttactccagaacagcttctcgggcccttgtgagagtggaggagggagggtagcgggtggagttccccgcacgataggattggcagggctaagtagtcggtactcgttgtactcccgcgggggtggacgcgaccggtgattcggtatgcggccagttataccgagaacctacttgcgcgaggaaagcccatctccgttgggctggtctgttcgtcccgggcggttgcgctcttgttctggaggggtaaggcagttccccggtcgccgaagagc

SEQ ID NO: 161 - DNA, 1014 bp, synthetic construct
  misc_feature 1..1014: note = Standard
  source 1..1014: mol_type = other DNA
gctcttccgtgtgcgaatataggcgggagggtgaggactgatcctactgccatgacaagggagagattatagaactcaggaagcaggaacgtgaacaacttcgagtgcttacagaagcataagatgcattcggatgctggagcgctggtatctggggctgtctcctagtacaccttgtggctggaggagccgtccacacctagtagagggggaacccgtgtgcgagaggaatacggcccgtgctgcggtcgaccacgatgccctccgtcgtcaggacggacttttaaagcctctctcctcttcgcctggcattagtgtttgaggcgtcaccgacgcttcatgcggccgatcttacgctcgcggatctccctgtataattccctgacgttctcctcacgtgacacaccctgcacccgtctaacccaggatctctgccaatattagacgtgtaaggattgggaaatcgttcactgttctacatccttaccatcctccctgttccgacgcgcgcaacacataagactgttccttgctacgcgactgtatcacccttggagtccctgctatgggagtttgtcagctcggtcgactgcggacagtcaatctgaatgcgtttatcgtgtttcgcctcccgactgtgtcatatcaaccaacgtcccactgctcaacagggtcgaaaggggtggctcccaatccccttgaaggcgccttgcacttcactacctccgtcataataaggattagataccctggtagtctagtgtagtctggtcttacccgcttagggactcgaagagtaaaccggcctcagtaggaaccgggcacacggtgctcactatgacacatgggacaatgtggagagtgagacggcgtcgggatcgcacgtcagagggctacagcaactttagataagctgttcaacatcgttacctgttccaagatcgataaccagacgtgtttcccaacggacgcgggggagtttattcagccctttcggagtggtcggtgaagagc

SEQ ID NO: 162 - DNA, 1014 bp, synthetic construct
  misc_feature 1..1014: note = Standard
  source 1..1014: mol_type = other DNA
gctcttcacaggatgactttactgattggcctcgtgtgggtacactatagtcctagcgggctaaaaggtccaagtcggttcagttgaatgcagttctccgtgtattggacaccagttggtgtccgcgggcttgtttccgttagctcggggttcgttcgtccgggaaaagtagaggacaataggttaataattgaggcgtaaccatggagacgcgcctcatgatgggtgctgccagtctctgttgcgtctcggtgtccctagtcggcgcgatgccctccgtcgtcgactcaaagacgtgcgtattcctcgcgcgctccttttcacacgcacttaggctgtctgtctaccccgcgcgcgtactgcgtgttcgccagttacggcccctctcattctcccatctaaggcttccgatacgccgccaaggaccgtcaacctctctatgccgtgccttacaattcaggcaatatcgtgcagtgagtgtatccagaaccatcatcgcgttccatgccattccccccgtgaccctcacacttggcaatgcgaataatctcccgcaccgtcacgttgcgtgggggtcacaagctgatcttaagggtggcttccttccctcttccccttcattacctggtccatccaatcgaaagggtccactaccagctctagcccctgccggtaggtggcgcggttctcaggcctacgcatacctctcccccccggcgtgtttgcggattagataccctggtagtctcgatgacgtagacagctttgcggacgtgttgtccaaaaagcacacatcagagaatttctaggaaacaatctcaaaacgaccaaaaaatcagcgactacagttatctaagagggtcccaggtgtgcaatggcttaccggccagatttccgggttcgtccaaagccagagaaaaaggcacggaaaggacaaaaatcgcaagaataggggacagagcgccgtgaacaacagaggtgatcgacgacgttaagaccgaaccatcgaagagc

SEQ ID NO: 163 - DNA, 1014 bp, synthetic construct
  misc_feature 1..1014: note = Standard
  source 1..1014: mol_type = other DNA
gctcttcggcgggagtcttccgcccacgacgcccttaccggcactatccgtcttccggagacgtcacggacagcacggcatagggcggacttgtttactgcgaccgggaatcttctgacggaacctctaactcccaccacattcctttgccgccagatttcgccgcgttctgttgccgcaaggctacctgtggacgctgcccctgccggaatacctcttggccccctgagaggacatagcagaggcactggtccccgatgccctccgtcgtcccgaccgcgggatcatgtagaatctgaagtcagaactgcgggcaaaacaagcagctggcgtgggtagagagtcgcacggcaattatgggttaaagttactcgtaatgcagggccgaaagatcagtagggaattgggggccaggagtgcaaagtcgttctgtggcgactgcccatgaatccagcctggacgatgaccccgatcggtcgtaagcggtgagggggatatgtttgccgaaagagcgtgcagggagtcgacgaatccactaggtccggcgtgtaagcgcgcactaatgattgactggatcaggatcgcttttagctgaggataaggccgaaagcggcggcctgtggtatgagaaaaaagatttagtctgaggaatgagtgtcgccggtgtgagcggcaaggagggcctccttgtttgaggggggggatcggaagtactggaactacacaaccgtacttgatggattagataccctggtagtcgtctcggtgtccataccgcggtcccggcgtccagccttgtggttcggtgcgacgccccgggggccgccaaccactccccatattaacgcggagtcccctagccatacgcatactcaacgccaccccctcgctttaatagtggtatatgtgagctggggtgctatccctatgggtcctctccgcgctaaggtccggggtctccacgcagtgcctcttgcccacccggcgagttcaggtctgcccgtagggaagagc

SEQ ID NO: 164 - DNA, 1014 bp, synthetic construct
  misc_feature 1..1014: note = Standard
  source 1..1014: mol_type = other DNA
gctcttcttaagttagtgtgcgcgtatttgtgcgaggtaactcgggaagcgtgtagagtacgatccacagctaagacggttcctctgagaatataataggacacattatgttagcaaggctttatgtaatcgagtactatatggaacatgacgtatagaatagtgcgtccgcggtacttctggcgaggaatgattagagtcctccagaggggttgagactgaccgcgctaggcggcagcatataaccgagggtacgatgccctccgtcgtccgcaggcttgcgggataacgagcaccatgtatgtggcgcagcgatgtgagaaccaagcagcggcaacgaggccgcctatggatctttcgtaagtatgggtaggggtagggcagtcacaccataagttacttagttctaagtatcgggggtgaacaagcaggcttctcgccaaacgacgcgcgtcgtcaaggtcgaaacgcaggcgcactagggcgtggtgtagtcgacgtaaggtcgagagaggtagtgatgacgtctaggggacatactgcgggttacagaaactactcgctggtgccctgtggagacattggttcaaatggataaagcgggaggataagagtgcgtgaagaatcgctcagtagaagacggattgtgcacgacgtattcaatgggccgggcaaggcgctgacgtttacttgagaggcggagacgcggagcataccatcgacaaatcaatcatcatggattagataccctggtagtcgcgcgttggctgttgaagatatgcacctacgagactaccaaacgcagccttcggtttaaagcgcaggggcgaaaacataacgtacgtttaaggagaacgcacgggggcacggggcaactcagggcgagctacttggttattcaacgaataagggctccgatcaatgcctatctagtaaagtatacaggttgcgtgaaaacacttggaaccggagtcagttcggccgagtgcatgtttacgcggggcttggaagagc

SEQ ID NO: 165 - DNA, 1014 bp, synthetic construct
  misc_feature 1..1014: note = Standard
  source 1..1014: mol_type = other DNA
gctcttcggagtagagactaatcgtcgcattgttctaggtgtatgtgtggagggtcccaggtggagcatcgagttacggacttgagtagtgacagataggatgtaacgtaatgcacgccctccaaggtatattgcttgttttgacgtggaggcctgggcccaggaagggccacgcacacatagttgggcatatattgaaggccctgttcgtgttggggagacgtaagcctggcttcgacctgggagaagcggtcccagcgtaggggaacgatgccctccgtcgtcctacatgacgatttagagcgcccgtccccactggttttctcaaattgccaggccttcgcatgtggctcgcgactcatctccactgcatgtatagttcgacacctctattccttggttcactccaagcagcccattccaaacctttctatatccgcctaccaagacgtgctgctttactaaatattgagtggacgttctcgctgcacaggctcaccaattgcgaccgtgttctcccgttactactcatggttgccacaggattacatcatggctccccccgcctgtggggacagcgttcggtagtagttcctgtctgaccagaactctttcatttccactatacggccgtagaagattaaaacccctctggtcaaacccatttggacggccgtgtgttctccgatcaacccatgtcatttgtgacgcccacttcgctgtctggattagataccctggtagtcggaagcgaatagttctgttgtgccctgcgacccagtaatcgagggacggcaccttggcgattgtgcaggtgcagtaaataaaacgtcagaaggcagtagggaggggcagctgccccgaggcctcactgttctagtaaggatttgggagcccgacgtaatcgttgtcgcaaatgatgagaaacagggccgcttgaggaacgagtcgtgccacgcaagctgttggtagcttgtttcggcactgggccgctctaatttctgggggaagagc

SEQ ID NO: 166 - DNA, 1014 bp, synthetic construct
  misc_feature 1..1014: note = Standard
  source 1..1014: mol_type = other DNA
gctcttccagagacatcagggacactgagagatcagaggcgattgaccgcgggtcgactgcccgggtagcaagagcatacgtagatcccggcggcgcccctgtgaataatctcttacaggcagggcttaaaaggcgatcgtatcgggtcggtggtcgtgcgaaagtggtgttgtaagttggactggtgttcagtccgtccaggggttcgcttatgaccgggggcgcgggcattagcgggtaacaggcacgggcgccagggtgccaaggaggccccctcgatgccctccgtcgtccgtacagagatgctcatctgtctcgccccccggcgtgtgtgtcgtgccgcccccttaaccttacgcgcccatcatgctagtagtgcttagccggacatcgtacaatctgcctatcgacacacctccctgctattgccaagctcataccccccacgttcggagcgccctacctcttcgatgtatgtcggcaggcagagtctcggaactactatcaacggaaagtcggttgagcgcccctagtagccaaacactaactaggtccggggacccgcctggtgtcgctcatgtcgacagtggcgcccctcgttacagcccatatctattagtgctaaacgttacattcgacgcccctgcaagtgatatgcgctctcgcccaccggctggcgggtcttgttatagtgcgcccgtcccgcgcgtactgcggattagataccctggtagtctccgctctgactcgtacacatctcctggcacgtcacatctagccgtatggtagccggcgcgctgaggcccgccaggtcggaaaagataagaatccgatacatcaaccagcgagggcccgagggggcgctcactagaggaccagattgactggtccgacttcagagatgttgatagctcagctcggaacggtctggactagggagtcgctgcttacaggggggggcttctgtcgttgaagggctgccgtgtccctagatgtcgattaccgggaagagc

SEQ ID NO: 167 - DNA, 1610 bp, synthetic construct
  misc_feature 1..1610: note = Standard
  source 1..1610: mol_type = other DNA
gctcttccgcgcagctaccgggaccctcttcgggggagcggttgggggggcgagctatccgcacggccgggggggtcccaccgagagcgggaagctataccgctccccccgcacgccccgcgccagctgccgagctacgccggacgcgcgaggggacctccagtacgccgccagctacgcacggtcccgcggcaagggcgcccctgtccacaagctaattggcggccggagatttcggtgtcgcccgcggcaagctaacacactttgccagggcctaacgacacaatccagaagctacggggtcaggggcggtgcacagaccaggcgtgacgagctaaacgcccctcggggaaagcatggacgcctagtcagagctacagtatagtgtcgtggggcggctgaggggttgggagctactggtgcgggggaggcgggtctcttcccttggaccagctatcgctggccggggcatggagtcggctgtcccgcccagctaccccgtgcgatggcatgccccgggttatgcgacaaagctacgctggcgcagccaagtgtagcggaccacccacgcagctatctgcttcttgtcgccgcgaacggaatccggcgcgagctaacgaaaccgtgcgccgcggtcgtcagctcactggcagctatcgacgccggtgcgggctcgcgaatgggcgggaacagctatccccctctggactctcacccacccccccgcacgcagctacccccccatccccacccccacgccacccccaaggcagctaccctgtccggggcgtagtggccgtccacgcgcgcagctaccgggaccctcttcgggggagcggttgggggggcgagctatccgcacggccgggggggtcccaccgagagcgggaagctataccgctccccccgcacgccccgcgccagctgccgagctacgccggacgcgcgaggggacctccagtacgccgccagctacgcacggtcccgcggcaagggcgcccctgtccacaagctaattggcggccggagatttcggtgtcgcccgcggcaagctaacacactttgccagggcctaacgacacaatccagaagctacggggtcaggggcggtgcacagaccaggcgtgacgagctaaacgcccctcggggaaagcatggacgcctagtcagagctacagtatagtgtcgtggggcggctgaggggttgggagctactggtgcgggggaggcgggtctcttcccttggaccagctatcgctggccggggcatggagtcggctgtcccgcccagctaccccgtgcgatggcatgccccgggttatgcgacaaagctacgctggcgcagccaagtgtagcggaccacccacgcagctatctgcttcttgtcgccgcgaacggaatccggcgcgagctaacgaaaccgtgcgccgcggtcgtcagctcactggcagctatcgacgccggtgcgggctcgcgaatgggcgggaacagctatccccctctggactctcacccacccccccgcacgcagctacccccccatccccacccccacgccacccccaaggcagctaccctgtccggggcgtagtggccgtccacggaagagc

SEQ ID NO: 168 - DNA, 1610 bp, synthetic construct
  misc_feature 1..1610: note = Standard
  source 1..1610: mol_type = other DNA
gctcttccgcgccgatcccgggaccctcttcgggggagcggttgggggggcgcgatctccgcacggccgggggggtcccaccgagagcgggacgatctaccgctccccccgcacgccccgcgccagctgccgcgatccgccggacgcgcgaggggacctccagtacgccgcccgatccgcacggtcccgcggcaagggcgcccctgtccacacgatcattggcggccggagatttcggtgtcgcccgcggcacgatcacacactttgccagggcctaacgacacaatccagacgatccggggtcaggggcggtgcacagaccaggcgtgacgcgatcaacgcccctcggggaaagcatggacgcctagtcagcgatccagtatagtgtcgtggggcggctgaggggttgggcgatcctggtgcgggggaggcgggtctcttcccttggacccgatctcgctggccggggcatggagtcggctgtcccgccccgatcccccgtgcgatggcatgccccgggttatgcgacaacgatccgctggcgcagccaagtgtagcggaccacccacgccgatctctgcttcttgtcgccgcgaacggaatccggcgcgcgatcacgaaaccgtgcgccgcggtcgtcagctcactggccgatctcgacgccggtgcgggctcgcgaatgggcgggaaccgatctccccctctggactctcacccacccccccgcacgccgatccccccccatccccacccccacgccacccccaaggccgatcccctgtccggggcgtagtggccgtccacgcgcgccgatcccgggaccctcttcgggggagcggttgggggggcgcgatctccgcacggccgggggggtcccaccgagagcgggacgatctaccgctccccccgcacgccccgcgccagctgccgcgatccgccggacgcgcgaggggacctccagtacgccgcccgatccgcacggtcccgcggcaagggcgcccctgtccacacgatcattggcggccggagatttcggtgtcgcccgcggcacgatcacacactttgccagggcctaacgacacaatccagacgatccggggtcaggggcggtgcacagaccaggcgtgacgcgatcaacgcccctcggggaaagcatggacgcctagtcagcgatccagtatagtgtcgtggggcggctgaggggttgggcgatcctggtgcgggggaggcgggtctcttcccttggacccgatctcgctggccggggcatggagtcggctgtcccgccccgatcccccgtgcgatggcatgccccgggttatgcgacaacgatccgctggcgcagccaagtgtagcggaccacccacgccgatctctgcttcttgtcgccgcgaacggaatccggcgcgcgatcacgaaaccgtgcgccgcggtcgtcagctcactggccgatctcgacgccggtgcgggctcgcgaatgggcgggaaccgatctccccctctggactctcacccacccccccgcacgccgatccccccccatccccacccccacgccacccccaaggccgatcccctgtccggggcgtagtggccgtccacggaagagc

SEQ ID NO: 169 - DNA, 1610 bp, synthetic construct
  misc_feature 1..1610: note = Standard
  source 1..1610: mol_type = other DNA
gctcttccgcgctagacccgggaccctcttcgggggagcggttgggggggcgtagactccgcacggccgggggggtcccaccgagagcgggatagactaccgctccccccgcacgccccgcgccagctgccgtagaccgccggacgcgcgaggggacctccagtacgccgcctagaccgcacggtcccgcggcaagggcgcccctgtccacatagacattggcggccggagatttcggtgtcgcccgcggcatagacacacactttgccagggcctaacgacacaatccagatagaccggggtcaggggcggtgcacagaccaggcgtgacgtagacaacgcccctcggggaaagcatggacgcctagtcagtagaccagtatagtgtcgtggggcggctgaggggttgggtagacctggtgcgggggaggcgggtctcttcccttggacctagactcgctggccggggcatggagtcggctgtcccgccctagacccccgtgcgatggcatgccccgggttatgcgacaatagaccgctggcgcagccaagtgtagcggaccacccacgctagactctgcttcttgtcgccgcgaacggaatccggcgcgtagacacgaaaccgtgcgccgcggtcgtcagctcactggctagactcgacgccggtgcgggctcgcgaatgggcgggaactagactccccctctggactctcacccacccccccgcacgctagaccccccccatccccacccccacgccacccccaaggctagacccctgtccggggcgtagtggccgtccacgcgcgctagacccgggaccctcttcgggggagcggttgggggggcgtagactccgcacggccgggggggtcccaccgagagcgggatagactaccgctccccccgcacgccccgcgccagctgccgtagaccgccggacgcgcgaggggacctccagtacgccgcctagaccgcacggtcccgcggcaagggcgcccctgtccacatagacattggcggccggagatttcggtgtcgcccgcggcatagacacacactttgccagggcctaacgacacaatccagatagaccggggtcaggggcggtgcacagaccaggcgtgacgtagacaacgcccctcggggaaagcatggacgcctagtcagtagaccagtatagtgtcgtggggcggctgaggggttgggtagacctggtgcgggggaggcgggtctcttcccttggacctagactcgctggccggggcatggagtcggctgtcccgccctagacccccgtgcgatggcatgccccgggttatgcgacaatagaccgctggcgcagccaagtgtagcggaccacccacgctagactctgcttcttgtcgccgcgaacggaatccggcgcgtagacacgaaaccgtgcgccgcggtcgtcagctcactggctagactcgacgccggtgcgggctcgcgaatgggcgggaactagactccccctctggactctcacccacccccccgcacgctagaccccccccatccccacccccacgccacccccaaggctagacccctgtccggggcgtagtggccgtccacggaagagc

SEQ ID NO: 170 - DNA, 1610 bp, synthetic construct
  misc_feature 1..1610: note = Standard
  source 1..1610: mol_type = other DNA
gctcttccgcgcgcagtccgggaccctcttcgggggagcggttgggggggcggcagttccgcacggccgggggggtcccaccgagagcgggagcagttaccgctccccccgcacgccccgcgccagctgccggcagtcgccggacgcgcgaggggacctccagtacgccgccgcagtcgcacggtcccgcggcaagggcgcccctgtccacagcagtattggcggccggagatttcggtgtcgcccgcggcagcagtacacactttgccagggcctaacgacacaatccagagcagtcggggtcaggggcggtgcacagaccaggcgtgacggcagtaacgcccctcggggaaagcatggacgcctagtcaggcagtcagtatagtgtcgtggggcggctgaggggttggggcagtctggtgcgggggaggcgggtctcttcccttggaccgcagttcgctggccggggcatggagtcggctgtcccgcccgcagtccccgtgcgatggcatgccccgggttatgcgacaagcagtcgctggcgcagccaagtgtagcggaccacccacgcgcagttctgcttcttgtcgccgcgaacggaatccggcgcggcagtacgaaaccgtgcgccgcggtcgtcagctcactggcgcagttcgacgccggtgcgggctcgcgaatgggcgggaacgcagttccccctctggactctcacccacccccccgcacgcgcagtcccccccatccccacccccacgccacccccaaggcgcagtccctgtccggggcgtagtggccgtccacgcgcgcgcagtccgggaccctcttcgggggagcggttgggggggcggcagttccgcacggccgggggggtcccaccgagagcgggagcagttaccgctccccccgcacgccccgcgccagctgccggcagtcgccggacgcgcgaggggacctccagtacgccgccgcagtcgcacggtcccgcggcaagggcgcccctgtccacagcagtattggcggccggagatttcggtgtcgcccgcggcagcagtacacactttgccagggcctaacgacacaatccagagcagtcggggtcaggggcggtgcacagaccaggcgtgacggcagtaacgcccctcggggaaagcatggacgcctagtcaggcagtcagtatagtgtcgtggggcggctgaggggttggggcagtctggtgcgggggaggcgggtctcttcccttggaccgcagttcgctggccggggcatggagtcggctgtcccgcccgcagtccccgtgcgatggcatgccccgggttatgcgacaagcagtcgctggcgcagccaagtgtagcggaccacccacgcgcagttctgcttcttgtcgccgcgaacggaatccggcgcggcagtacgaaaccgtgcgccgcggtcgtcagctcactggcgcagttcgacgccggtgcgggctcgcgaatgggcgggaacgcagttccccctctggactctcacccacccccccgcacgcgcagtcccccccatccccacccccacgccacccccaaggcgcagtccctgtccggggcgtagtggccgtccacggaagagc

SEQ ID NO: 171 - DNA, 1851 bp, synthetic construct
  misc_feature 1..1851: note = Standard
  source 1..1851: mol_type = other DNA
gctcttcctataagaattcatagtactaatgagaagaatgtactattttgtacggaaactgaataactaatcggtctgaagtacagagttcactaaattttggatagcatcctttgtttaaataatatctggatgaacagctggataattgaaacccatacaataaaattggagctaagtcagatattcttgttacatattgaataagctattagttgaatatttgttctttcaaattgctaaatccgatacagaaaaggaacaacagttggaaaaaagactgtaaacaaatttacagtacataggtcaataaagagtttatacttagaacttttcgcatctccggtaataagctagtggcatattgataattgtatgagttaggtagtttcattcttactagtgttgatcaagttatggtcgtcatctgaatcgttttagcctcagtaaaatgtgggtcatcctatgaagtatagcggtgaaatcaaaaaattacatcagtttccatattatgttttaagctaatttagtgttacttattaaataatattataacagatttctggggcattattggtaaaaaatagcgcgaaatttgcggcgcagccgacggagccgaatgcccgtcaagaaacccaacaaaacaaaaaacacaaactaagcgaaaataaacagagtaaaggtaggataatgctcgataaaaggagattggaaatcaactaaagggaaaattgctaggcgatagcttcaaccatctcaaactcctttcattcctatactgcaatagcatatttatctttctctctaccgctaatttatagccacttatttcatttgtacccctaaatgagaggcacggctagtaacacccacgccgtgtgcaactaaaataacaatggaataaccctctcaatagaatttgtaccggtttttagaatgataagaacagattcctacatgaatttcagactcatcttactgtagggatgactgggaatacttcgctcattttgcacaatgtttcgctcaaaggcgtcaccctgcgatcacacctctctaaacctgtcgtccatcaccccatgtgttctcgcgaaggaccccccatcacgcgacgacacgcatgttatatttttagtttttgctaaggatagagtacgaattggaactttcgcgggggatctttgactctgagctcccaccaaacaccggccccttactcccgccgccttagaggagttgcgaagtagaacgcatggaccgggtgattccgtacacctagcccctcatcttagactgggtatcatgtcagtcccgtgttcctcactccgtgacggagctttcgtaactagattaactgcccgctacgtacttcaataggtttgtttaggtgacgggccttctatgattgaggcctccgtctgtcgaagcctctaggaggtcgtggtcttgcccccctgaggtaagatcccttcagtagacccgccgtcgctagacacgcgtgcttatttttcgttgtttatatattaagctttttgtagctattttcttttatcgttgttgacacgttcgttagcgtttggctcctaatcaacacataaacactacacatgaagacatacattcggagaatcaatgtaggtgtttcggatcgcttatctagagggtgacactacgcaaattaacagtaccactacagtccttagtctagttcgtggatctatcctatttctcaccttctcaatttaccattgtgcccctgcctttgcgtttgcacatttacaaatatgacttcgtactattaaatgcttagctgaaaattcggaacccctgtacgatcctggaatgaagagc

SEQ ID NO: 172 - DNA, 1838 bp, synthetic construct
  misc_feature 1..1838: note = Standard
  source 1..1838: mol_type = other DNA
gctcttcgcacttgatttagcgtatagattcgagttagccatactctttgttatgttcatttaatgtattggattgtatattcatcattaaacacagaagcgtctaaagtaacttcaattttttttgataaaatattatacatgcttgttttatgaaacatagtaattataaatgtatattatttttcacattcaagatacagttgtggttgttttgattgaggtccaaatgtttagatttgatagattttatctaagaacaagtgatattttgcatagcaatatgcgttgcgtccgtgtgtctaaggtatttttaatcttttctttttagtttctttaattttttacgtttgttattaactcacaaacagtaatagcaccttatcatataaacatagagacacttctaatgcttttgccaatccgacgggatctaccgattagcgagagcacaaagtctgccttggacaactcgggttactgaggtaagcaagattgaccccagggccataaaaaacgaggccagcaggtatgacaatgaaatataaattcatttcctcttcgttcttgtagttgtgctctcgtatgcgggaaacaaatagaataacgttcttccttctacaaagttgaatggctgaaatgtgtttagttatggctacgtttcctataagtcaaggttttcggaattaaatcttccatcacttagtctaactgtcttctaagcgtctatgtattttaattctaattgtgtattatcaatgttttgactttcgttattgcatttagctttagacactacttgtttgcccctgtgtcttttattcagaagataattagtgtttctcgtagatgatgtttagttttcactgggctcgtaaattgtagttcttatctgttttagggttcgtctaatattgctcaaacccggcagcttcgggagtctttccaacaaacccttaactttatgtaggtaaggatcttggtacatgacaaaacggagataatagttaaaccatagttataggtggtctggcaacagattgatgactcggtgcatctacgaactattatgaaaatcagcgtgaatcacgaaaaggcgcctcactcaagtttttgcgttcaggtacatatatgggagctcccagacttgatctgtgggaaatattgcgtgtaaagcaatgagcaagcctcttcatctgaaaacttaactgcttcacaagttagcttgtgaaaaaagtcaaccaaaaaaaattgtaaagtgaaacgtgaaggaaacatgaaaacctgaaattttgtatataagaaagaaaaataggcaagcaaatagcattaaaaataggattaaaaagtttaatacaattccttaggtcaaatttaccaaggaaaaaattcaaattaatctgctaaaaaaaaaagaaattcactaatagaatctccagatctactaaaagctgctaatcattagtttttttgttgtgtattgattgtaactcaacttgtataacccatactttcgttaacaaccgataatttaagaactatatgtttacattactccacttatacaaaatatctgtgaaaaaattctctaactaaacagtatgctctttccgaaattagttaatgtaagttcccattatatttactagaaattatctttttttgcttttttgaaaatgttcttcggataaatacttcgaggctagtacggaatcttttttaatcttcattctttaataattcataaactcaataacactatcgtcatataagcgaaatcatatgaacttgcaaaaaatttatttttttaccacataattaacatattctagaagagc

SEQ ID NO: 173 - DNA, 1913 bp, synthetic construct
  misc_feature 1..1913: note = Standard
  source 1..1913: mol_type = other DNA
gctcttctctttacagttcccttttgatgccggacgagagttaaaggtacgttaggaagtgttcaagtctggattaatagtgttttttctacaactatttttactcatttgcgcctgcgctaatacataattctataggcaccagcagcgccaaatcattagtacaatatgcaacacaaattgttatattgatcacgaagtactatattccacccaataaaattgtcgtaggacataatgcggagtttaagtgctaattgccttaataaaaggtcaacataaagtatttctaatagagtactttagaaattcgatacgataaagaacttggtgaaaaaggtaatgttataaaaagacatttaagttcacatttttctaggtaggcctagcctccgttatgcgatatgataacagggaccagctgggcggggtttacacgagattgcggtagtgagctcagggctaagtcatatcacgaagactaaattaagaattaaagagataacttgttaagacgcattctttgtatagagatagaaggcacggcgggcacttgcgtaccgtataacagtatgtcctgcagtgtagcataatctgggttttcaagtttcttccacatcgattgtttccgtttaagtttttatcttttcctattctactaaccttgtttcgatattgttagtaatctactgcgtaccatagcagacattcagacgaagtcgggcagtctgggagagctcattctgcaagaatttattttttttcttatattcgtacttgttcgtggtattgaaagcgtctgcttgtatgttcttgtgaggttattaaacttctggtttcgccccaaccaaacaataataacaaacactctcttctccataatttctctgtaacccctacttttatttattcaaaaacaggaatacaatgctttgttagctagctaaaaggactcagaacttgcatttgtgtaaccggctgcatggatggtaagctgtgtagcctatgcattctatgcgcaactggcacattgcgatccccatttcaattgtatatgttgcaagagagaagctgaacatgattgacgtcaaaacatcatacctgaacataatattaatgtatgacgagtattcacaaaattttacctatcggtcatatttcggctagtttagattatcatgctaattttctacgtaatttgtgaacgaagcaggatagcgcagggtgacagctaatagaagtctaggctgtgactttccattgcagatggtttctattctgttagaaattcggggttgtctttacttttagcaagagtcgctaaaaataatatacaagtctatatctatctttgcccaagtttaaatgtgtctccacactgttatttgcgaaagagggagtcagagaacgggccaaggaggaagtgggtaggttagtagtcataggattcatagggcccgatattgtcattcccgaatagtttataggagttttactagtataccctcctagtcttgggtaccaatctaggtagctaaagtaaagaatcgctacgtcccttagctgctctccccctgtcatgctattaatggtccgaataagttactcgtatattcgtagatgtccaattcaatactttatcattcggggcgcattatttatgccaccttgacgtcgttcaccccttccctcgttgggtacagatgtcagagggaaccttagatggtttagcatcaaaaacgagcttagttctattcatgcacaaattttacctcagattttcatatcgtattggacccaacgatcgcgctcgggaagcaaattgatggcaaccccggttcctcaaccctcccaagataccgtcgccgatacacgagggttaagggtgtaagcgaaccccccattagaagagc

SEQ ID NO: 174 - DNA, 1912 bp, synthetic construct
  misc_feature 1..1912: note = Standard
  source 1..1912: mol_type = other DNA
gctcttccgccgaccatggaaaaagctggaatgcgctcaactacgggggagtaggaggaaaacggattggcgaacgggaacgtgtgttttttacttgggtggtgaaatcggaccgggtcaactgatacacggaccgtcttgaacgccggtttctgaaataaggcgttggacattcctgggttgccaagccggaggcagaggttagggcacgtcaggattgcaaatagcaccatgagtgactagcacacaaaagatccaaccgcatccgacggttcattgtgattcgcgacaaggaagcacggagtctgccccacactcgtgtgcgcaggtagtaggctggtcaggaggattctacaggcccggggggtggaggtacagctgtatgatggcctaaggcgtcttaaaacgtggaagggactaggtattattacacccgttcttctagcctcgggctctatattgtgttcttaagcgcatataacaaaacacaccgggcaatggcgactttcgagccaggccttgataggacaccccgccgaagaacgtcgttgcgggacccgtgaatggaatcgagatgcgggacgcactaggggtgggatacgtgatgcaaagggcccggtgcaggtgtcagccataacgtagggcgtagacactgaagaacaaacaggggcaaactcgagcgtcggacagagccatttcttaccaaataatcatcggtgaaggtaagcgacggtgattggaaagggaagcgaggaggaggattgcgaagatacggaacgggagggtagcatcgtaggctatgtgcctccgcgaggggggccacgccgggccgctgttcacttcgagcttggcagggatggggcctcggtcgacggggcaggggcatcgagcaccgcctactgggacaacagggagagtacaagcaaaaaaaggcagtcgtaatagaaccatgtactaccgagcacaaaagatgccggagtagatatccgcagcgactagaggacggtgaaacctcaacaaaaagtaccacgtctggctatgatttgaaagataatcaggaactgttggtggcggcctggagcacgttgcttaggggtttggtgggcggggtgggcggaagcggattaattctctctagcaccccccacagcagcatcggaagatctaaatgccgatagtgtgtccttctgctggggctcaatttaagttacctcgtcagcggttacgtcgtatggatatagcatcgatggatctaacaattaaaaccgcttcctataaaatcgcacaagcgattctggtgtagcattgtggtcggggcccgaaaccagcggagctcgaagttggcttacacctaataagactcgtttttatggtaacctaccatgtctttcctcgtgcctaggtcattttacggggccagaaaaacattggctccactaacgtgcgcaagtgcgcttggcgtgttccgggcggacaatgggcgcctggccccctcttccattccgggttctgtttggcggtgggtcccagcctgaagactgtcccttacatagaccaccctggaagcgttagaggatgagaacttgagacactccggtcttactgggtgacttgcgtctggaccacgtcggcgccggtgccgtgccgctcaggacagctgttcgcgtacacggtatcaataccatagggcggctgacagggcacgcgcgcgtcagagtacgcgtggacgtggacggaatctactaccctcccatgagccgatacgcggtgtcacattgtcctcctacacccaatagactacactcggacgcgcccaccgtggaacctcccgcgcgtacatcggcccccggccactgtgcggaacagttggctaggtgatcctcgggttctctcttgcccatcagcgaagagc

SEQ ID NO: 175 - DNA, 1879 bp, synthetic construct
  misc_feature 1..1879: note = Standard
  source 1..1879: mol_type = other DNA
gctcttcccaggcctatgcgctcgggccttcactaccgttcggacgcttccaccgttctgaagcactggaggggtccaagtcggacgccggattatgcaaggcttcgatgaggcaaagtgtcgtcgatgcggggctggccaacacctaagattggagcgcgcgcttcagggactcaatacagccaagtacccatttgccttgtcctagtcccctcgcaagcgccggctgtgtcccacaccggatgtactcgtgtcggcgtctaggccgcctagcaagcctgtgcttgacgggcaggcgtgggaaacccgttctgtatcgggctgtttccagagaacggctttgagtgataattagttcgccagagtcggttagcgttttcgtaggaaaggcaccgatatgaacaaagttcgagatatgacgtgctcggtgaacacaaccggtataagttttcatcctattctagaacctccagattagtatcaccaaccgtagtggtacagggggccccgaaacacgactacttcgggcaaccgttcgctacgtgacgtgtgatggcgcataacgtactggctatctcctttgtaaattgcctcaaccctagatattgagaaaattataaattttagaattataccactatattagtgcggactatttgtcaactatctctacccggcttatctgtggttggaggcccttggacggcaaagatatgctgcgtgctctcgccgtgacgaatccggaatacgccgcccttggagcagacacatcgccaaggagagcgtgcgtgggcaaaacgaaaaacaataccttcctaacacaccccatcactacctcctagtcaaatataagtgctttcctacttacgcatttctgaagtatagtattccacagccagggagttcaggcggattgtttacagaaattgaccttaaaagtaaaggatgtattaatattttttttttactacagaaattgagcacggatcagtaagtcccagaagtcaggatgtttttaagtcgattcattggatggtgagttggcgctgcccagtaagccgacgagggctgcgttcatcaggggccgtgactggtggagcctaccggctaagtttggtaatttcttgtcagcccctttctgaccctcgtgactcttttaaaaatgagatggtactgcaatttgtcattgctgacgggatcgagtcaacgcaggggtacaaaatggtgaccaaatcctatttgataaactcgactacacgacacacatggaagtgccgaattcgttaggacgacgacagacggtaggttgggaagtggtgagggcgagcatagctcattaacggacaagcacatacccctttcgtcaatctcagacgtagcacattctctaagagcctgtgctgtcggtgtgagcctctacagtctgggggtcggggcgatcaccgctgggcgtacgcctttgccgcccggaagttcctgtcgatctctccagggctgatcggaacggcgtttagacggaaccgccccggttcacatcaagcgcccttgcgtctgtgctctcacggattgtatccggccgtcgttgctgcgcggcgcacctaattattaaccagggtctgtgggccacgaacgagtccttagatttgcgtatcctacccgacgctctgctaggaagaaggggctctcggttaccgtttgaagaaagcgccggtgggccgcgaaggatttcgcgacgggtgccgccttctgatacccggtgtgttgacacatatgcgttcgtcagattcggctgccgctttctagcgcacccctctgcaacggcctactcagaagggggttctcggggaggcagagttattgggacgaagacttgaagagc

SEQ ID NO: 176 - DNA, 1910 bp, synthetic construct
  misc_feature 1..1910: note = Standard
  source 1..1910: mol_type = other DNA
gctcttcggccacaacaccaggttaatcgaggaaatacccaacgattcgttggctgttaaacttattctgcctgcgcttactgcacgtaaaaattttctcttacattacaactccaatttccagaacgattagcgaatgttatggctctgagacacgacatatgactctaagtttcttattgaaatcccttgtatttatgcccgggatcattttatgtgcttcaccacaacatcttcttttggacttaaccatcatgtgtaaatgagaacgtagttgcattataaatattaaatgagtatatgagaatgtttaggatgtcaagtttaaccccaataccactatttatcttattaaacaaactgcactgtagaccagatattgaaccgagatttgctactctaataatagtatgcttcaaaattgtttataagtcctgtaaaccatagagaaagttcatcttcgagagtaagacgaagaaaggatgtgatagccatagttgtatagaatttgggaacatatagaggcaagggcgcgggactgagaagtagactgcatcggccttctcggcgcatccccccctcttactttttgttgacgcaagcgtctctgcttatcggttcccattttcggccctttatcatggtcatgtatgagataaccgtaaaaaatcggttaccgtcccgctcaaatgattattctgacccatacctggagcccccccaataagtcgctctataatatgctcgcacaagcgggccggatagctaagtgcagaccaacgatcgtgcacgcaacgacgcataccgcagtatgtggcaagaaactcgatggtggcaatcaaacgctcggccgagccctcaaacgatcgcgataacaggcagtcatctcagtgaacggccgagctgtaactgctaactaaacgagagggccgctaggtgtgagccccgaaccgttactagccggacacagagagccgatttcggacagaagcttgaggcaacgcctcagcggacccgtcgaatgatgccgatagacaccaggtatacagacgcagatcggattagtccgcagacgatctgcccggcagaatttatatgccaaataggtgacacgaaagatgcgcggtccttggtagccacggctcaataacgggagatgcgtgaggaatcccacacttataggccgaagccgtgccttaagtgggcgtccaggcaaaagaacaacgagctgctcccatgaaccagaatcctacagtacaagtcatggatctggtagcgaaagtgcaggcttgcgccaaaatggcgggtcaaagcgttaccccggcggatggataggtggcctatggaaccaagaccactaccagaacgcggagtccatacggaggacgcatgtttccttgtctgcacacacataatcacaatagtaatacccaataaagagagagatgaaaaataaagggatgtctattatgcagtaagaaatagtaataggaagatggttactattcttcaccacctctagtctatgtagtgtgcacatcccatttcgtggtctggtaatgctttaaggatgataacacttcttttagtaatggtggggttctgggggactggagagcggagcgcggttaatgaacagggatatctttgccgactcaactgttttaccaggatacattttaccttaatcagctcccgagggttagaattctgactagtttcggtgctgacccttatgatgccactaagtttggtcccgtagtacatcagcttatgttactctttggggcgcattaatgtatgttggagtatttgcaaatcattttgctccaatacatatgacgtctagtataagatcactaaatttagcaaactgctgtcttaacaaacttggtcgttctttgaagagc

SEQ ID NO: 177 - DNA, 1214 bp, synthetic construct
  misc_feature 1..1214: note = Standard
  source 1..1214: mol_type = other DNA
gctcttcttccctatatggttctctgtcgttccatccatattctgtcgctttcgaacaggatatttacgtttctataggcgtaagtgatagactcgtgcgtcttctcgggtgatgaggtgtatgtgctgtacgcccctgcatttcagcttacggtcccacgcccttaccaccctgcactcgcccaaaaaaaggaagaaaataccttctcccgtatcagggagagcacgagcaagaagctcgaagccattttattgcagatcagtgttgccacccagatatgacctgaggcagactatttgaagccgatcctacatctagcggagtagtcaggtagttttggcatctagattgacctgaactaacagaaaggaacggaagaagacgaagtgctagagcattaaataagttgttacaaatagtcagtagcttccactttaaacagagtgattgccttatttgtccttggccaactgatgagggggataccgtcaacgtccatcgctcctgttcatgtctctatgggagaatttatcacccacggagcacagtacaatagcccccacgcgggaacgtgatagggtgatgcaaggtttaccaccggagcgctccgctcgacaaagttcagtcacgcgcttccgatgtccagaaagaatacagactctggccatggtcaaggtctacaagtgcccgtcaataaacatacgggccggcatccgacgcaaatgcccaatatgtcggaattatggccgattgcgcggccattatttacggcctctggcgtttggggttacatacaatatttacacccaagcactactaataccttttaggaccctaggactagataagtaaattgaatgagcaataaactatgagtaggatctgaagttcttgcaataccactctttcagatttatgtgagtgaagagtaacaactaacacctactataacaattaagacgataacgaaaagatagaatcctatcctcaaaactaagagttaaataatacatgtctattggggacgcaagtatagacaattcaagtatactatatattacagacctcctgtcagccgcagtgatataaccagaccgcccagtgaccgttgtgacccgatgaccggcgaacatgttgccttgagtggagatgcgatcagcccaactgggtgcactaagccccagcgaacaacctcacgcctccgtagaagagc

SEQ ID NO: 178 - DNA, 1214 bp, synthetic construct
  misc_feature 1..1214: note = Standard
  source 1..1214: mol_type = other DNA
gctcttccactctatactgctcgcgttcttcataaaccacgagagatcggttaggtctatccaattcggatatgcataaggtcaacgtcgagttctcgccctgcctatttcctgaaccccattcacgttcccattggacgcacaagtatatccttttctcatgctgcctaatgcaccttttgctatccaaacactacctagcaaacgcatactagttttaggtagcaacggggtacgcaattcagagtgcaccaaaacgtccacgtctttacacacattctccttcttccgtcagtctcgttcctcttcccccaattcttttccctaccaatcccaccccattacccctagacctctgggttttaattgtctttgaagattgcgtccctcaagagaagtaaaacaatagactatgggagtgcgttgaaagatgtaaaaagtaatagagtaggtggagatttagaattacgacggaaaaatatggtctgctctgtgccgcggatgtggcgaagagacatgtccgtccgacgggatttaaggccgtttcgtttgcgagtgtaggtcacgtcgttgtatcaagtatttgagatgatcggagtctgcaatgagaccatgaggaaattacagaatctcgcttaactcaaacacttgccttttggtaaagagccgtgaaagattataaccatcccataccaattacttaagttaactctaggtactatttcagccgcattcgctaaagtttaatttttcaatttgataacatttcatatctaatatagagaaggatataccgttcctgtcttctgttagacctggtaccgacgttacactccacccttgttctttcgagaaaaattggaggcaagtaaaaaactgcggtactaatcctacgcctcaccaaccgcaagctccgtctaaggggtgggtactcagcaaaagattgggccacagtgggtttcatactcagcgcattacctctctgttctccatctgttccacccgtttattatggtttcgtctattgacaaggtgaccacgcctcctacctcgcaatctagtgttccacttcgaccccccatacttccctaccatcccgtactccctcatgctaacacttacgacaaccacccccccacctgcgacgataaacatcctctcacacctccaccacacatttcgctttgctccggttagccattattatgaagagc

SEQ ID NO: 179 - DNA, 1214 bp, synthetic construct
  misc_feature 1..1214: note = Standard
  source 1..1214: mol_type = other DNA
gctcttcacacgatcacagaggggaccaagagcgaaaacagaaaatcacgatgaggggactccacgcgtcgcacggtgggatttagtaaccgcgctgcctgccggccgatggtcaacctcttggtctattcgatcaccgtgaatgtaatataaccgggttggccgaccacggaatggagcagacctagatccctaatgacaggggcatgtttcctcatatggcccggaaagttgtgcgggtgccgagttactgcaggcgccagagccgcttagagaggaaagtcgtgagggggtcgcgcttgtgacttgactgctaagcgaggttgggccgccgagtccgtccctctagggaagtgtgcgaatggcctgggaaaatttatctgccgtttgtggacaaaaggaaaacatagggtcgtggacagtaaaataggcggaggtgaggactatggttgtgctgtgcagccacgtaggggcgggtgtatggccgcgagggggtcgagattatgaccctgcccggctagcgtgtatagatcacacgacccgcatgtgcctcacgtgactcctcatcctcctagtccaggacggcctcgtagccggagcgcctacgcatccgttagcggcaaggagaattcgcagggcatcccaacatggtcgcttagcacacaaaccggggggtgtacagggcagtcgtgcacttcccaggcaccgggatacctatcgacgccgtagcgcgtcctctcagggtctattgacagtgcatgtccttcagtcatggtatcgcccactctcgctttatcttccctcttcaggtctccatcgatcgtggcgtacagtcgatcagaaaacaacttgttgtgctctcatcctgtggacggtggagtctagatagaggccatggcggcaacgagtcggaggtttctgtcttccgccgcattcgtcaatcccttcaagtactggggcacacggacaattcccgaatcgtgtgcgacgcacccaagtctcaagcatatgtttccacttcccgcgcccgctctatgccaccctcctccgtatgacttgggactcccctcctgccgtaaactattacgccccccttgaatccgtttcgcttcgcctcgattcgttggctagcccgttgttgtctttctcgcctcttgtgatctcccacgcattagtctctccggtcatgctggtggcgacagattgcgaagagc

SEQ ID NO: 180 - DNA, 1974 bp, synthetic construct
  misc_feature 1..1974: note = Standard
  source 1..1974: mol_type = other DNA
gctcttcaatggtttagttaatggtggtaaatattaaattgattgatccttgtccgccctgaggttattattattttttattattttttaaattcggacgttactttatatggagctcctctaccgttggggcggtttgccgatgaattgcaggtcggttcccccttggatgactgacacacccgtccgtccatcctcgacgttcgacggcaatatgacgggctccggcacaacacgctcgtcctcggtttttagtgagtttcgttttaaagccttctgggcgttaaatacgtccgtcgtgatgcctttgaccatccgctggttgcccggttgcttcaaacttacgtatgtggcagcgctacagtcgccggcccctggacatatttgtttaactcattaaactggttaaggatactatgcaattgatggaatcacacagacctatcgtttacccgcgctttttgttactcattcatttaactgccgtagacctcgccggcactctgacatataacgtaacactgaagactggcttgccatacaaagaataattgaagattaggtcacctgtcttcttgctctgtgcgttttcgtgattttaggtgtgaggacgtgtcgaatctagcacgctcatttgtcttccacgctgtagtgccgttagtcgactaataaaccctaattctacttgccaacaccaccgataggacgtgtcgaatctagcacgctcatttgtcttccacgctgtagtgccgttagtcgactaataaaccctaattctacttgccaacaccaccgataggacgtgtcgaatctagcacgctcatttgtcttccacgctgtagtgccgttagtcgactaataaaccctaattctacttgccaacaccaccgataggacgtgtcgaatctagcacgctcatttgtcttccacgctgtagtgccgttagtcgactaataaaccctaattctacttgccaacaccaccgataggacgtgtcgaatctagcacgctcatttgtcttccacgctgtagtgccgttagtcgactaataaaccctaattctacttgccaacaccaccgataggacgtgtcgaatctagcacgctcatttgtcttccacgctgtagtgccgttagtcgactaataaaccctaattctacttgccaacaccaccgataggacgtgtcgaatctagcacgctcatttgtcttccacgctgtagtgccgttagtcgactaataaaccctaattctacttgccaacaccaccgataggacgtgtcgaatctagcacgctcatttgtcttccacgctgtagtgccgttagtcgactaataaaccctaattctacttgccaacaccaccgattcttatgtgtgtaactgaaaaacaagcccctgatagtagaatcagagactatatcccgaaaagtcggtactttctccttcaggacctctccgtattccggccagggtgtcgaagttgaccaagtcgtacttttccccttatttgtgtcccctcaactacccttgcagtcgtttgggagatgttttcgacttactcgtacccatagatagatagatccatttcgcacggaatggtgtacttgccaccccaattgggtaactccatgaaggggccgtgtgatggtgtgagggctataggtgactcctcagtacgcatcgtaaaaggcgaaataagttctaagatcacctataatgggtagaaatgctacaatctatctctcttgcgaggcataccgggtgaagtacgtaggagagacatgaaacttgatgtccaggcggggccatagcctgtagctgagtgaaatgagcgctaaccaccagccttcaaggagcaccttgggagcagttgacataaaaacaaaccacagaaccatcataacacccacatcaggccacagggctttgagagaactattgtcggccgtgtttgcttttaatacaagaagagc

SEQ ID NO: 181 - DNA, 2090 bp, synthetic construct
  misc_feature 1..2090: note = Standard
  source 1..2090: mol_type = other DNA
gctcttcgccaacatagttacttccagaatttggtacgcaatataattcatggcctggctacttatcttgaaacgaaatcaccagatagaggcggatgtatgacgaggcttagttaaccgaccaatctcggtggacaaaaaggtgcgctatttccgtaagcaatctcgaaatttaagagtgtactatcaagataaacgagtcacagcgaactctgaaaggtattaaaagaacctgtccgctttatactttttatattaatttttaccaaacattatagttgataacgtttagttttagtaattgatgacgaaactaatatagatctggctaatttatcttttattctatacttacttaagatctaatttcttgatacgtcgtcatgacgataattttgcgcagataccaatcaaatatttccacttgccctgtatgctgtagtgatatcatgtagcagtcaagccgatttctggctaaggatcaataatgtatcaaacattacgaaataatcaaagacgagcaatcagtcgcgattactatcagctggtgaggtggaacgaattcccacgagtatttgccatttatggtgagaaaggatgtcaccagagttgttactcctaccccgaggtcagaacgttcttattactagagctattgtatttagcagtgacatcattaccctaaagacctaatttgaaaagtataatcgtactcacggtatgatatctgtgctgatacatgactaaagaatctaaaattaagagcatcgcggttattttgggtggaatagactagaaagcatatgcccacaatacaggcctagctagttgttactcctaccccgaggtcagaacgttcttattactagagctattgtatttagcagtgacatcattaccctaaagacctaatttgaaaagtataatcgtactcacggtatgatatctgtgctgatacatgactaaagaatctaaaattaagagcatcgcggttattttgggtggaatagactagaaagcatatgcccacaatacaggcctagctagttgttactcctaccccgaggtcagaacgttcttattactagagctattgtatttagcagtgacatcattaccctaaagacctaatttgaaaagtataatcgtactcacggtatgatatctgtgctgatacatgactaaagaatctaaaattaagagcatcgcggttattttgggtggaatagactagaaagcatatgcccacaatacaggcctagctagttgttactcctaccccgaggtcagaacgttcttattactagagctattgtatttagcagtgacatcattaccctaaagacctaatttgaaaagtataatcgtactcacggtatgatatctgtgctgatacatgactaaagaatctaaaattaagagcatcgcggttattttgggtggaatagactagaaagcatatgcccacaatacaggcctagctcgtccgaacattttactactatttgactcgtactttgtctcaaaatcataattaaatcatcggggaaccgaaactaaccctattagttacggtgtcattcatagcgggtggcagatgtgaactagccttctgtccattcatcaacaccccactgacggtttgtcctaaagcatgcacgtgattacatacacatctaaatatatttgctttgcccatcactccctcaaagtccctacgtaggcgcggggcacgcagtaaaaacctggaccgcatatttcctcaatgtgattatgctgttggaagatctttacagtgtttattttttcataatttaatttcaaatcaaatagtttggtatagtatttttaaaatcgtaagtttcacaatgttcataaaaacgtttaaggtcttggccgtcatagtaggatgaattaaggagtaataatttaatagaaatataaaatgacgtattgaacgggatcaatagtatttgtaaaaagaaagaaatctatggtaaagttgtacttggagtaaaataaaatttcgtataagctagagttttaaatcgattatttggatatttttattcgtattttctttgaagagc

SEQ ID NO: 182 - DNA, 2456 bp, synthetic construct
  misc_feature 1..2456: note = Standard
  source 1..2456: mol_type = other DNA
gctcttcagttagtaccactcgacgattgtaaaaaaggagaggcccggaagaacagaaatccgcgcccgctcgctcgccacacctggttcctcctctaagagctcctcgctgccgactgaactcccccccgccctacgcgatgcgttccccctcgtgtttatcgatgtttcgaacgatgggcttattagcagcctggccgttaatgcggaaatacgggatggtgaccgacgcgcgctccggtgagtgaacatggaacatgtccgttaaccctacccgattgaaacacattgctggtcgaaaccgccgacagccaggcttcctcgactgacacttccctttctgcatagaaatgctcccgggatccttactcccgtcgtatgtcccctggccgatcagtctcgagtacgggggccccggcacgtcatttctacttaacgcgcagtcctctcctggcgatttaattgttaagccgcgataaacacgcgattccctgtcacacagggctcctctcggcacgagagattcttacacttctttagtagctagcccataaacgctatcgcccacaacctggtctccttgcggactcttgacttctgccgggcgttttggtggtaggctgcactgcttccgggttggtcgggcggactttgctagggttgtcggctcggtgcccgccagttagtgttggtttggctgggttcattgggtgtgttgtcgggtgacggtgcggcttctttctgcttgggattctcgggacgcttgtggggctgagctggctgtcctctagcggtgtgcggggcggatccgtctctgcttaggtgtgtttgggtgtcggttgcagcgtttgcgattgtggtcttggtgggttgctggatttcgctctttacggtctgggatgggtgtttgcgcgactgtggcagtgttgttttggggttccgcgttgggttcggtgactgcgagttgggtagtcgcttcttggtgttggttagcggtgttctgggtgcggctttgtccgtagttgggtcgtctgcatgcagttctgtccttgggttcgggtaggcggctagtggggtgtggtctggttctcggtatttcgctaggggatctactatggcgtcggtacttggggtgtcggttcgatttgaaccactctccttaccaattcactctccgctggacttacctgcgcacgccctacagccgggcgcaatctaagcttcaaggttttggtggtaggctgcactgcttccgggttggtcgggcggactttgctagggttgtcggctcggtgcccgccagttagtgttggtttggctgggttcattgggtgtgttgtcgggtgacggtgcggcttctttctgcttgggattctcgggacgcttgtggggctgagctggctgtcctctagcggtgtgcggggcggatccgtctctgcttaggtgtgtttgggtgtcggttgcagcgtttgcgattgtggtcttggtgggttgctggatttcgctctttacggtctgggatgggtgtttgcgcgactgtggcagtgttgttttggggttccgcgttgggttcggtgactgcgagttgggtagtcgcttcttggtgttggttagcggtgttctgggtgcggctttgtccgtagttgggtcgtctgcatgcagttctgtccttgggttcgggtaggcggctagtggggtgtggtctggttctcggtatttcgctaggggatctactatggcgtcggtacttggggtgtcggttcgatttgaaccactctccttaccaattcactctccgctggacttacctgcgcacgccctacagccgggcgcaatctaagcttcaaggcgctgtcaacttttccccgactgatcactcgccgggcctggctgatccattcgaagtcggatgctcactacctgataatgggtaggtcaaaggcgtggcaccctcgccaaccggatccaaccatagcgcgagtgcgcggcccccaggagccgacggctggtattaaggcggtggtggtatcttaggagaaggttggagtattgccgggatggttacgaaaaaggacctggtacggttttctctgagatgtccgctggtatcggtaaggggaaggctgaggtagtgggtggcaagcattcacgtcaccggcgagtctcatcaaccaccccacataagacggggtttatggtgaccaaataaaccgtgcctcccaggaacggtcttttggggctgtgtattccttacaccgaccttttacgccacgtcgagatcctctcccagttactcgcccggtggggtgctacgttatgcttacttcgcggctgtctgcccgcgtcgacgctcacgaatacctgcccctcgccgctactgccgcccagctagtcccgtcgcttgggaatttcagaaggctagggggtccactgattcagccgaaccttcgaagagc

SEQ ID NO: 183 - DNA, 2002 bp, synthetic construct
  misc_feature 1..2002: note = Standard
  source 1..2002: mol_type = other DNA
gctcttcttcgaatactgctggtactttattaaacgtgaattcctcgtcttacactttgaatgctataccctaagtggagtttcacatacgtgccttgtgaactctggtcttgactgatcaacgcttctggtatgggatgtgcatattgctgaaagccctgtacagggtttgcagagagggctcatcgtatcggaattatgaacgattcaaagttactaaataggttcttcagtcttattgaaactacttaatgttcatcacactgatcaggataaagtaaattaacatactttaaatctactttcgtgaaggttacgactaaaaaaagtagaatctaatttatggcggagtgaaattaactcattaaaactgtcgctatagcgcacacaacttcaagaaagaaatcctcaatcagggagcatataacctatatatatcagataaatctaatcccagtaagacctagatcccgacattgaggcaatacatagcctcgtctttgttacaccgaagcgtgtccatagaatcgtatatttagtctgttccatgatatcagatttggttgaatattaacaataagaacttccttttatttaagcattatttccttcggtgtctcctaagtctccgacttagcccacttcctactaaactaagcaagttatccccagactaaacgtccccccataatcgccatcgcgaagtgttctgcattgctcgcttaccaacatctctgcgacattctcgcccgcttagctcgcttcgcagctttcgacgccatccctgtagctgttatttcccgctaccagatcgttcatcacggcgcccactctgccttctctccgaggtctaacgcgcggttgcgtacgcggctaaacacgatagtccagaggatttttgacaattttcttccctattcatatcggccctactaatcctcttctttgtcgacgcactcagtcgcaccccgttcaaatgcaaacccctcgctccaacaccggcaagtaactcgtaccctttatcgcactccacactgctgcgcaccattacccggttacttgtccagaccatcccctaacccccaccaaaattactcttatgactaatacgcctcacaattctgtaccccaatctcactcctatttgcctcgtatccgccgcctttaaacggcctcaccgtcccgccgcagtgtcgtcccgtatagatctcgtgcttgcgcagatgaaacaaataatgtttatacttgatttccttatcttcaacccgtggcctaatctccctcgcaacctgacgacctccataacccttgtctaccccgcatcatactctaccctgtactcacacaatcaatctgcattactgtcccggccccactacgcccgaaccccgtttgaggacgagtccccgagaaactactgttttaagcaaggctccaccatttgtgtaatgtccttgatcattgattaaaaataaaagtagcacagtacacacggaaatatgtgtatgtgcaaagcaattagccgaaaatttatagaaacctgttttataactaccgaccgtgtgactggccaatggagttcccaaccagtggtatgtgcgtattaatattcaggcacctaagccatagattttccgtatacgactcctaatcccgaactctgcttacctcactcaacgattatgctacgtaagattggtttttattgagataaatgtgagttgaaactttgataaaagggactctccggttcaaacaagtccgatcctttcgcaatcaggggctactgagtcttaccgcctggtccgtttccgtaatttatcacctgtgcacttgtttttacaaaagaacagagctttttaaacaaagccaaagcctcagctttcggattattaacgacatagacatcacaattcaaaacaagctcacgagtatcctgtttaagtgtactggcggctttggatgtatcatcattcctaagtatgaaatgtgaaagaagagc

SEQ ID NO: 184 - DNA, 1594 bp, synthetic construct
  misc_feature 1..1594: note = Standard
  source 1..1594: mol_type = other DNA
gctcttccaggagcaagagatcgaatgggcagaatgccgtatgctaatgctacacgcttttacaagcttgagcgaatagaaatagttttaaatatctaacctgctagggaacagaaggtcctagcccaacgccagacgccgatatgtccaatggagatataagattaacggtcatcgtacgtgaccggtagtttctgactgaaagtatccgaggctcagagagtagacaacatcgtcagcggaatgatcaaccgaatatagtataggacttgtgttgaagcatactcctgtcggttcatctgaatagactctaaatggctagtctgacggctcttttgaacataatgctaaaattaaaaatagtatgaactcttggaaaatggcaaccaaggacgtccattgatagttcaaatgtatattttacctatatgacaagagttgagcaccaatttgaaattagttgcaactgtgtagtcacggtgtggttgagaggagctttaagacttgcatatgattgagctatgcgaattatatgaatataataaggccttcaggtctcaaattaaaatacaagatcaaaggcgttgaatcgtccttgcgtggtttgtcggtcggatgcgtcgaattctgtaacgagggcgatcctcggatagatgacaggccggctaccccccatgaaaatcggcggtatttcgacgggaaacgcgacgtcagatcgttaaatatatgggctctttccaccatcgagttattaattgaagggacggcacgatttaacagttgtgatcacggaaagcgcttggaaccgaagacagtcgacgggtcgtggtaggtcgcgtctaagctcgtatagggagacaaaatccgggcggagtaattttaataagggacctaacaggatcgaccataacatcatggtaacgcacgcggtggcgcataatggtcagcgggaccgcatgaagcacaagcgataaacccggtaacccggcgcgttgtcaccctgctatgtatatttacccagtcccttcgcgtatcgaggacgtatttctttataccgcgaaacgcaaagttacctttggttccaatcgctagaactcaggggtaaaacaacaaaaccccggaaggctgcgtggtcacttgggcaggatactgtatataatcttttattagtatttgtatcggctcctctaactatcatgcttactggtttataaacggggttctgaatttagcactgcaatgtgtgccagttccatgtccacagctgtcgtagtgatgcacctatgtattatcctagcatcgaagtatgccccgcttaggtgttaaaatatttaaatgagtctaagtggcgtcgataggttcggtagactgttgtggcagttaagaatcgagttagttaatgtgttgtgccagaagtacctataggtcgctccctttaaacggtaactatggtggcgctattaacttcaaggcgaatagttaggttgtctggttggggatcctaggcactgattcgtatcctatagcgctatgcatcccgcgataagcttcaccatccatccaacaggagcgtattttatcattcacgaagagc

SEQ ID NO: 185 - DNA, 1444 bp, synthetic construct
  misc_feature 1..1444: note = Standard
  source 1..1444: mol_type = other DNA
gctcttcgtaggtaacgtcgctgctaggtaagtgttgcccatagcaacctatgtccctcgcttaacttcgattacagtaatttttttagctcgccttcagcgccgacttggaacgattcctccgggtatcgattaatgtgcgtcgtgtttaatttatagcgactggctctcaaagggctagagccacctcatgtaggcgcgactagtgcgcccactatccatggcgccggggcctcctgcccatacgtggtatgtagcattttgttccacccggattacgtagggccacttctttcgatccgatcctagcgttactatgttagttcaagctctcgatcttctggctacgaagaagccgtcatagaccattcagattgtctttgttatgagtttgattccgacggtgtcatgttccctttggcgtatgctatgcgacggcgcctacttcacagcagaaccacctagccattcccgccgtacgtccgaggatggcgtacgtgcgctctgtttatctcaggcgtaatttccactcgagcactgttcagtcgttgatttttcctcccactgacgaaatatcttggggtcctcgatcccctggcggctgcataagtcttttatccttatcaatagacaatgtatatttaaggagtgaagactctcttcccagcgtggctagcacttcctgccatgtccaggttctccggtcctttctatagtgatgtaagaaagtttgggtgaccgcagattcgctcaccgtgatagggatcagatatgcataagcaattttctacctgcagaatccggagtttaagaaaacctatcaggactgcctgggtcatgccgggtctggtatatctcttgttgtggcatcccaaacgtctccattgctgtcagagtccggcagttcatcgtatgcacacgcgttggtgacacgggtctctcggcactattcataaaatccgtggaaaacccccttactcaaacgcttcggtgtaccaccatggcatgtgtcgagcttcttatgttgtgcctgctttggtaagacaccagctcaggaccgccatcaccgcttcagtgaatcgggttcagtgctatcttcattgtgtccaaatgtgatgcctttactgggttaacgggttaggcatcagttgtctgaacctagctagctggcccttgggttacacccgtgacacttagcccctgattaaacaccctagttttcaaatgcactcccatagtccactatcggcgttgtgtctttgagagagggcgtgaaatgcgcgcacttgcattgaagcgtgtaagggaattcgcgttcactgctggaacacgctgcggattttcccggaacgtttcacactgtcttagccggcacgatgggcgatatatggccgttgaaacccgcagatgaaggcgatcgataataggaacagatgagaagagc

SEQ ID NO: 186 - DNA, 764 bp, synthetic construct
  misc_feature 1..764: note = Standard
  source 1..764: mol_type = other DNA
gctcttccttcgtatcgctgtggtctggcgcgtaatcgtttccacgctgatcctcgcctacaagaacgcgcttagtggggcgtgatgggcgtattagcgtctgcaagccgccactagtataacgtttcgtggcttaacctggtcgcgggtggtccgtcggatcctcctcccaccacaatctatctgcccctattcgagggccgatctactcgttttcccactagcctttgcagcggtctgttgtaaacgatgcctcggcactcctgctctcggaacttccagctggcagtagtataactgacaggtggtcgatactggtatgggggccagcttcttggcaacttgggggcgaggaacgtttgacgccccacgcagggtctcaataatgagctccgaccactccagagtagtgatcccacatggactggttcgctctggcataaagaccggtctctcttgcagtatagcataccccccagccgattagacgagagtctttaatcgcaagcactgtatgggaggggaaggccccacagcgtcttctgtgggctgcgagaacagatcgttatacgacgactacttaccgttagacggtattaaactcaacgaacctgcgctggatgtaagcaaacatgtagctaccagtgccagaggaaattgcacttgtctactccttctcattggagtgcaaattggcgacgtaatactcaaagaatttgatttggcagtggaacaacacttgttgtcagcaccttgcgaagagc

SEQ ID NO: 187 - DNA, 764 bp, synthetic construct
  misc_feature 1..764: note = Standard
  source 1..764: mol_type = other DNA
gctcttcgcccctattccgcgacgacaagcccgtcgttattggagttagtccgtggctccatgacgagtcgcgttacatagtccttaccccggcaacgtcatgtatgagctagaggcctcacgccgcccccactagcagccgtatgtgctccgcgatgatgtgccttttcaccatctcgccttaaggctgcctgtctttatcagttgcagtgcggtacgtacgtaagcacagactcagtctggttgtcagtcccaaaatgcgacttcttccctcattgtctacctgggagaagattgcgacgaaagcacttggcattgtcaagtgcgcgaaccaagacgctatttaggtacttcaaacatctccttttatcgcagtaggtatcctcacgccataaaaggttcttaccttgtttccaacgtaatgcgtggacgacggcgccggaggggaaggccccacagcgtcttcgtcgcgggaaggaatccagatctgtggtcatgtgtgtcatcgtttgctaacgaagtatcattaacggcacaaagtatggaagcacaacccggctggatggcagcgcataagtttaagtaggaacctcattttatctagtataattaaactcgcatgaaattaccaagtgtgaacgcattgttttgctgaagggactaagctcatagtaacttcaccgttaaaaactagaacagcgttgtataccatgatagatctatcaatatcgtaagcttcccgtattaagcatcgtgagaagagc

SEQ ID NO: 188 - DNA, 764 bp, synthetic construct
  misc_feature 1..764: note = Standard
  source 1..764: mol_type = other DNA
gctcttctgatccaggatgcccgcccgtccttacgatatttcgagcgtcttccgttcattcgtccgataaccccgagctctgaatggtttacgtaccgggctccttaagactccatccgactcacgaatcatccccgtataaaacttctcgcgtagggaaccggtccttccagcacggctcgcctgcccgtagtatgtaagatgcacttagagatctccagtcgggtgcatatctggcactcatatactacacgtcagaactctaaccactagctacctctacatcgagtcgctagtccataataggcgtctgagtgcaggaagagatggaggggaaggccccacagcgtcttcctacagagagtatagtatcgctgcaatgctcaaatgtctgatctgatagtcttcaactgaagtactcgatatcctcttacattttgcgttagcgatgggtggataggagcactgtcaataggtgttctagaggctagaactacgactgcggaactaaataatgcaaaaagatatctttttggcagtggaacaacacttgttgtcaacgctccctgctaagatctcttgtaccattttacacagtcgaggtatgatttatctaacccatgttttctctccgttgggtcctcccaaagtggtgagaaggataagcggggttagtgcagcatcagataattgatctacgccaagtatacaagatctcggtgatccggctaccctacaaaactttcatagattctaagaagagc

SEQ ID NO: 189 - DNA, 764 bp, synthetic construct
  misc_feature 1..764: note = Standard
  source 1..764: mol_type = other DNA
gctcttcgttgtcccctatctactattcccgcccgggatcgccgctttaacttttgacaatctcccctcattcaggggggagtcccgcccacatcaattccgcggacatctcatcgctcccggtctgggccactcgtgtgtttcccggcagctctcgcacatacaaaagtaaatgtgtaggacatgcgttctgttgtttcagttgggtcttatcgactgatttcaaacgtatacgggagttctgtgcactcctgcgcggaacagttgtcaacttaatcattcacgtagtgatataggtaacgagcttcagcttttcggccattagtgttccagagcctggccgtgagaccttacggggcaacttatcacgctttggccttcaacgtatacactgggttcagtcgccacccgtgcgtcgcttgaccagcttgtcctgaccaatctggaggggaaggccccacagcgtcttccatactacacccgaagtgaggggatgaaatcctggtcctgtttgtatttccgaaaactcgcacgagggctgagggactgggtctcgctagaaaataaagttcagtaccatggctagctctggtagtgacacagctactgcatcgataaaagtcagttggcaatgattagtaaaagcgtggttttgcaaaagggactaggctcatagtaacttcgtcgccaacaatactattagggtcaccctttggtctctgcggaaccaacacggacttaaagtctttcgtccgcggaagagc

SEQ ID NO: 190 - DNA, 764 bp, synthetic construct
  misc_feature 1..764: note = Standard
  source 1..764: mol_type = other DNA
gctcttctttcaccacttttgccgaccgtgaagagagtgatctctagtacatcgatcgacaaccgccccatgcatctgccggatatctgtacaatagccatagaaaatacttattagcgagctattaacgggtcccgcggtttgtaaagtacggttccgctgcaatcaacgaatacccgtggtacgcatccagtttcatactatacgcgagcctgcccggccaacggcgtttgtagttatggccccgacgtcagcctctggtattttccgtagtcgactagatctagctacgctgaccgacgcagctctgcgagctacattacagtactcataggaacggccattgctccaattttcacccgagtctgctgcacctttccagtttgcagtaccccgcggtaactagcaacgaacctattttggtaggactgctgaaggaggggaaggccccacagcgtcttcgtctagatacgcacgaccaacatgtatagtataacaacttggtgtaaaaatccggggacatggttaaatgtgcccagagttaaggtaggcaaagcacttcgtttgcctagcactgtctatgttcgcgtagtcaacggaacctacgttgtagggtcttgtgatgaccgagaacaaagagtagtaggagatttggtcccggaacaaagcttatcattacagtaaatgttagctttaacatctaattgggattgtgaatcgatcgatcgatgcatcatcacacaatctcgattcattagaagagc

SEQ ID NO: 191 - DNA, 764 bp, synthetic construct
  misc_feature 1..764: note = Standard
  source 1..764: mol_type = other DNA
gctcttcgccctatgctcgagcgttatgcccggggccttcagccctggtttttacgatatgctccgcgagtgcgggtcgcgcctctaaacgatgaagcgacccgcctgggcgatggattcaatttctgtccttctcggagtcccttgcttgcatgcagaaagctgcgttcatattacgatgcgctattagcgcttagagtttgcaagttgctcagatgtataagcattgcgatcatctactcgtatccctctccggcctcccgcgttacccacacccttagatattatttccttccgcgccttgtacctttccctaggcgttgacagttattgccgcggggatcaaagactagatcgcactctagtacagcagtgcgcgaagaggctcacacagttcggccgtgagacggaggggaaggccccacagtgtcttctgacaaattccatgagaccgtcaaaaacaattcgagccatttaaaactaatgactagggcgaccagttgctattgggaaagtatgttttcgcggtcgtcaataggtgtcgaactcttgctggcatcaagaagtgttaacgagtgatgatcacgcctaatgcaaaaagatatctttttggcagtggaacaacacttgttgtcaacgctccctgctaagatctcttgtaccattttacacagtcgaggtatgatttatctaacccatgttttctctccgttgggtcctcccaaagtggtgagaaggataagcggggttagtgcaggaagagc

SEQ ID NO: 192 - DNA, 764 bp, synthetic construct
  misc_feature 1..764: note = Standard
  source 1..764: mol_type = other DNA
gctcttcccgacaagatgaggtactgcttgtttttttcgcctccatgataacttaatccagggcgctgtctctcaaaccgtgaccataacggaacaccgcacgcagtcttagctttcgcttcgcataacctaagacccgcttaaaggaatcacaatttattctaactacggctttcaccattccgcttcacctctagaggttttacacgaagcgttactatgatcaaatgtgcgcctgttatccacgtcgtgtgtagtaaatattcccacatgtgcgatcatgtcctctcttcgcaacgactgtcgtagtaggcctaacttcatggagaccgttatgggctggggtccgataggatccgttagtgtggtcagaacctcgcccctgtctaatatgacattagtaccaatgtttgcgcaaatccttaactccaaatcaggctttggagcacctgatcttgagcaatgcaatataagcagggattaatacacaaatagaatccgcgctgacagctatagctggtgcttacttgcgccacagctagcgggaaggtatcaaacaccggtcgtaagtacaaaattaaacatcacaacgtgtgcccaatcgatattcaggtaatactcaaagaatttgatttggcagtggaacaacacttgttgtcagcaccttgcccagcgtgtcgtcagctgcatgaaagtttcacaccgatgcttattggctaatttggagatgctgcatgctcgcttgtaggggaatatcgaagagc

SEQ ID NO: 193 - DNA, 764 bp, synthetic construct
  misc_feature 1..764: note = Standard
  source 1..764: mol_type = other DNA
gctcttcgtgccacaacgatcggagctttcgcttcaagatgtaaagagacctatactcaccgcactagctacatcaccggttaataccataaatggactgctcgaatgcatggtaaatgtagccgttgcattttcactctgcagaaaacgggatccgtcactaagtaacgctactttcaacacatgtgggttgcggcatgtttgtcccttgacaacacgtctggttttatggtccgttctgaccaccattttgcgttagaggcctactaggatatggtaacctaatgaacgccgttatggttcgatataacttgacaaatccataggcagtaatatagcggctagttgagctctgacagatcgtatgctcaatactgatcactgtacacacttttactgctgcaaaggcttagaatatttattacatgtgaaccaaggatagagatagctcaacgtcacccttggtgaatgactagtcacacacattaaatatcctgtagtgttaagctatatagtcgtaactactaggtgctgttcgaggtagaccgaatctatgatataaagtcgcgagtcaatcggctgtgcaatgattagtaaaagcgtggttttgcaaaagggactaggctcatagtaacttcgtcgccaacaatactattagggtcaccctttggtctctgcggaaccaacacggacttaaagtctttcgtccgcgtagcatctcttgtatatttcggaagatcaaccactttatattatagaagagc

SEQ ID NO: 194 - DNA, 764 bp, synthetic construct
  misc_feature 1..764: note = Standard
  source 1..764: mol_type = other DNA
gctcttccgggagattccacaacgtgtatgcacgatataatagtgccgatgaaaacatccaacgatcaacctgacatcgggatcctttctgaccttagtctgtttcaaggcaacgacgtgagccgttgcattttcactctgcagaaaacgggatccgtcactaagtaacgctactttcaacacatgtgggttgcggcatgtttgtcccttgacaacacgtctggttttatggtccgttctgaccaccattttgcgttagaggcctactaggatatggtaacctaatgaacgccgttatggttcgatataacttgacaaatccataggcagtaatatagcggctagttgagctctgacagatcgtatgctcaatactgatcactgtacacacttttactgctgcaaaggcttagaatatttattacatgtgaaccaaggatagagatagctcaacgtcacccttggtgaatgactagtcacacacattaaatatcctgtagtgttaagctatatagtcgtaactactaggtgctgttcgaggtagaccgaatctatgatataaagtcgcgagtcaatcggctgtattaccaagtgtgaacgcattgttttgctgaagggactaagctcatagtaacttcaccgttaaaaactagaacagcgttgtataccatgatagatctatcaatatcgtaagcttcccgtattaagcatcgtgaactattttgaacattaactcttgtgcttctctagtttaaaggaagagc

SEQ ID NO: 195 - DNA, 764 bp, synthetic construct
  misc_feature 1..764: note = Standard
  source 1..764: mol_type = other DNA
gctcttccaggatgcccgcccgtccttacgatatttcgagcgtcttccgttcattcgtccgataaccccgagctctgaatggtttacgtaccgggctccttaagactccatccgactcacgaatcatccccgtataaaacttctcgcgtagggaaccggtccttccagcacggctcgcctgcccgtagtatgtaagatgcacttagagatctccagtcgggtgcatatctggcactcatatactacacgtcagaactctaaccactagctacctctacatcgagtcgctagtccataataggcgtctgagtgcaggaagagatggaggggaaggccccacagcgtcttcctacagagagtatagtatcgctgcaatgctcaaatgtctgatctgatagtcttcaactgaagtactcgatatcctcttacattttgcgttagcgatgggtggataggagcactgtcaataggtgttctagaggctagaactacgactgcggaactaaagcaatgattagtaaaagcgtggttttgcaaaagggactaggctcatagtaacttcgtcgccaacaatactattagggtcaccctttggtctctgcggaaccaacacggacttaaagtctttcgtccgcgtagcatctcttgtatatttcggaagatcaaccactttatattatagagtcttataaaaactcgagcaccgcggttccaggaattgcttctggaatgaagatcataaccttcttcctctgctgaagagc

SEQ ID NO: 196 - DNA, 764 bp, synthetic construct
  misc_feature 1..764: note = Standard
  source 1..764: mol_type = other DNA
gctcttcgcatgtcgggagattccacaacgtgtatgcacgatataatagtgccgatgaaaacatccaacgatcaacctgacatcgggatcctttctgaccttagtctgtttcaaggcaacgacgtgagccgttgcattttcactctgcagaaaacgggatccgtcactaagtaacgctactttcaacacatgtgggttgcggcatgtttgtcccttgacaacacgtctggttttatggtccgttctgaccaccattttgcgttagaggcctactaggatatggtaacctaatgaacgccgttatggttcgatataacttgacaaatccataggcagtaatatagcggctagttgagctctgacagatcgtatgctcaatactgatcactgtacacacttttactgctgcaaaggcttagaatatttattacatgtgaaccaaggatagagatagctcaacgtcacccttggtgaatgactagtcacacacattaaatatcctgtagtgttaagctatatagtcgtaactactaggtgctgttcgaggtagaccgaatctatgatataaagtcgcgagtcaatcggctgttaatgcaaaaagatatctttttggcagtggaacaacacttgttgtcaacgctccctgctaagatctcttgtaccattttacacagtcgaggtatgatttatctaacccatgttttctctccgttgggtcctcccaaagtggtgagaaggataagcggggttagtgcaggaagagc

SEQ ID NO: 197 - DNA, 764 bp, synthetic construct
  misc_feature 1..764: note = Standard
  source 1..764: mol_type = other DNA
gctcttcgagactgcccctattccgcgacgacaagcccgtcgttattggagttagtccgtggctccatgacgagtcgcgttacatagtccttaccccggcaacgtcatgtatgagctagaggcctcacgccgcccccactagcagccgtatgtgctccgcgatgatgtgccttttcaccatctcgccttaaggctgcctgtctttatcagttgcagtgcggtacgtacgtaagcacagactcagtctggttgtcagtcccaaaatgcgacttcttccctcattgtctacctgggagaagattgcgacgaaagcacttggcattgtcaagtgcgcgaaccaagacgctatttaggtacttcaaacatctccttttatcgcagtaggtatcctcacgccataaaaggttcttaccttgtttccaacgtaatgcgtggacgacggcgccggaggggaaggccccacagcgtcttcgtcgcgggaaggaatccagatctgtggtcatgtgtgtcatcgtttgctaacgaagtatcattaacggcacaaagtatggaagcacaacccggctggatggcagcgcataagtttaagtaggaacctcattttatctagtataattaaactcgcatgaataatactcaaagaatttgatttggcagtggaacaacacttgttgtcagcaccttgcccagcgtgtcgtcagctgcatgaaagtttcacaccgatgcttattggctaatttggagatgctgcatgctcgaagagc

SEQ ID NO: 198 - DNA, 764 bp, synthetic construct
  misc_feature 1..764: note = Standard
  source 1..764: mol_type = other DNA
gctcttcgcgctgtttcaccacttttgccgaccgtgaagagagtgatctctagtacatcgatcgacaaccgccccatgcatctgccggatatctgtacaatagccatagaaaatacttattagcgagctattaacgggtcccgcggtttgtaaagtacggttccgctgcaatcaacgaatacccgtggtacgcatccagtttcatactatacgcgagcctgcccggccaacggcgtttgtagttatggccccgacgtcagcctctggtattttccgtagtcgactagatctagctacgctgaccgacgcagctctgcgagctacattacagtactcataggaacggccattgctccaattttcacccgagtctgctgcacctttccagtttgcagtaccccgcggtaactagcaacgaacctattttggtaggactgctgaaggaggggaaggccccacagcgtcttcgtctagatacgcacgaccaacatgtatagtataacaacttggtgtaaaaatccggggacatggttaaatgtgcccagagttaaggtaggcaaagcacttcgtttgcctagcactgtctatgttcgcgtagtcaacggaacctacgttgtagggtcttgtaatactcaaagaatttgatttggcagtggaacaacacttgttgtcagcaccttgcccagcgtgtcgtcagctgcatgaaagtttcacaccgatgcttattggctaatttggagatgctgcatgctcgcttgaagagc

SEQ ID NO: 199 - DNA, 764 bp, synthetic construct
  misc_feature 1..764: note = Standard
  source 1..764: mol_type = other DNA
gctcttcgtgatccaggatgcccgcccgtccttacgatatttcgagcgtcttccgttcattcgtccgataaccccgagctctgaatggtttacgtaccgggctccttaagactccatccgactcacgaatcatccccgtataaaacttctcgcgtagggaaccggtccttccagcacggctcgcctgcccgtagtatgtaagatgcacttagagatctccagtcgggtgcatatctggcactcatatactacacgtcagaactctaaccactagctacctctacatcgagtcgctagtccataataggcgtctgagtgcaggaagagatggaggggaaggccccacagcgtcttcctacagagagtatagtatcgctgcaatgctcaaatgtctgatctgatagtcttcaactgaagtactcgatatcctcttacattttgcgttagcgatgggtggataggagcactgtcaataggtgttctagaggctagaactacgactgcggaactaaataatactcaaagaatttgatttggcagtggaacaacacttgttgtcagcaccttgcccagcgtgtcgtcagctgcatgaaagtttcacaccgatgcttattggctaatttggagatgctgcatgctcgcttgtaggggaatatctttaaatacttgacatcacgtaccgatgatataggctatgccgtcccgatgttactagacgatctaaccaaacaacatgtgtggacgactgataatgatagaagagc

SEQ ID NO: 200 - DNA, 764 bp, synthetic construct
  misc_feature 1..764: note = Standard
  source 1..764: mol_type = other DNA
gctcttcagtgctcgagcgttatgcccggggccttcagccctggtttttacgatatgctccgcgagtgcgggtcgcgcctctaaacgatgaagcgacccgcctgggcgatggattcaatttctgtccttctcggagtcccttgcttgcatgcagaaagctgcgttcatattacgatgcgctattagcgcttagagtttgcaagttgctcagatgtataagcattgcgatcatctactcgtatccctctccggcctcccgcgttacccacacccttagatattatttccttccgcgccttgtacctttccctaggcgttgacagttattgccgcggggatcaaagactagatcgcactctagtacagcagtgcgcgaagaggctcacacagttcggccgtgagacggaggggaaggccccacagtgtcttctgacaaattccatgagaccgtcaaaaacaattcgagccatttaaaactaatgactagggcgaccagttgctattgggaaagtatgttttcgcggtcgtcaataggtgtcgaactcttgctggcatcaagaagtgttaacgagtgatgatcacgccattaccaagtgtgaacgcattgttttgctgaagggactaagctcatagtaacttcaccgttaaaaactagaacagcgttgtataccatgatagatctatcaatatcgtaagcttcccgtattaagcatcgtgaactattttgaacattaactcttgtgcttctctagtttaagaagagc

SEQ ID NO: 201 - DNA, 749 bp, synthetic construct
  misc_feature 1..749: note = Standard
  source 1..749: mol_type = other DNA
catgtcgggagattccacaacgtgtatgcacgatataatagtgccgatgaaaacatccaacgatcaacctgacatcgggatcctttctgaccttagtctgtttcaaggcaacgacgtgagccgttgcattttcactctgcagaaaacgggatccgtcactaagtaacgctactttcaacacatgtgggttgcggcatgtttgtcccttgacaacacgtctggttttatggtccgttctgaccaccattttgcgttagaggcctactaggatatggtaacctaatgaacgccgttatggttcgatataacttgacaaatccataggcagtaatatagcggctagttgagctctgacagatcgtatgctcaatactgatcactgtacacacttttactgctgcaaaggcttagaatatttattacatgtgaaccaaggatagagatagctcaacgtcacccttggtgaatgactagtcacacacattaaatatcctgtagtgttaagctatatagtcgtaactactaggtgctgttcgaggtagaccgaatctatgatataaagtcgcgagtcaatcggctgttaatactcaaagaatttgatttggcagtggaacaacacttgttgtcagcaccttgcccagcgtgtcgtcagctgcatgaaagtttcacaccgatgcttattggctaatttggagatgctgcatgctcgcttgtaggggaatatctttaaatacttgacatcacgtacc

SEQ ID NO: 202 - DNA, 750 bp, synthetic construct
  misc_feature 1..750: note = Standard
  source 1..750: mol_type = other DNA
cgggagattccacaacgtgtatgcacgatataatagtgccgatgaaaacatccaacgatcaacctgacatcgggatcctttctgaccttagtctgtttcaaggcaacgacgtgagccgttgcattttcactctgcagaaaacgggatccgtcactaagtaacgctactttcaacacatgtgggttgcggcatgtttgtcccttgacaacacgtctggttttatggtccgttctgaccaccattttgcgttagaggcctactaggatatggtaacctaatgaacgccgttatggttcgatataacttgacaaatccataggcagtaatatagcggctagttgagctctgacagatcgtatgctcaatactgatcactgtacacacttttactgctgcaaaggcttagaatatttattacatgtgaaccaaggatagagatagctcaacgtcacccttggtgaatgactagtcacacacattaaatatcctgtagtgttaagctatatagtcgtaactactaggtgctgttcgaggtagaccgaatctatgatataaagtcgcgagtcaatcggctgtattaccaagtgtgaacgcattgttttgctgaagggactaagctcatagtaacttcaccgttaaaaactagaacagcgttgtataccatgatagatctatcaatatcgtaagcttcccgtattaagcatcgtgaactattttgaacattaactcttgtgcttctctagtttaaag

SEQ ID NO: 203 - DNA, 2940 bp, synthetic construct
  misc_feature 1..2940: note = Synthetic TCRG 1
  source 1..2940: mol_type = other DNA
gctcttcgatcagcgactactaggattataatgtacgtgcgcgacacggaggggaaggccccacagtgtcttcacatgatacttgggatgatgaggtcccaacacgaccttagtccttagtgaggtcctttcatactgtgaccttcgtgttcctcgttaaccttaaactctgacgttttagattaatttttactaagacccaagataatgacacggtggaccctgtcccttaataatattctttgagtttggcagtggaacaacacttgttgtcagtacgtgcgcgacaccggtcgctcgagctagctcgagcaccaagcccagccctagataccaaatcaggctttggagcacctgatcttataacagagttgttttaggcgtcgagctgcgtcgtacccattctgttcgttgtttcacctccgttctttcttaagagtttgagagtgaagttaggaatggtagttcaggcatctctttcttctgtaccggcaaatgatgacacgacgcaccctaatcttaataatattctttgagtttggcagtggaacaacacttgttgtcagcccagccctagatatgagcgctcgagctagctcgagctgcgtgttacgaccatcaggggaggggaaggccccacagcatcttcacatgatactgtagacgttgaggtccctatacaaccttagtcctcagtcagtcctttcgtactatgaataccttcatcttcctattcgacctttaaatatggaggttttgatttacttttacggagaccccagataatgacacggtggatcctgtcccccgttctcaacccgtttttttagttccattttggtcccggaacaaagcttatcattacaggttacgaccatcaggtgcttgctcgagctagctcgagctatacgggctaacgtttgacggaggggaaggccccacagcgtcttcacatgatactgaggatgttgaggtcccaacacaaccttagtccttagtcagctcttttcatagtatgaatacgttcgtgtcccttctcggaatttaaatatgaccttttagattaacttgcactgagaccccagataatgacacggtggaccctatcctatggtgaccaaccaagttctattttgctgaagggactaagctcatagtaacttcacgggctaacgtttgactgcaagctcgagctagctcgagcctgggtcggaggatatacaatgaagtcatacagttcctggtgtccataagtatactgccgtgacagtctttccttaggccgtaaggcagtccgtttaaactccacctatcctatggactttgcagatgtaggtgagagtggtaagtgttacatctctttgtcctgtatcgatggatgatgacacggaacaccctccactatcatcactaacctagttctgctttgcaaaagggactaggctcatagtaacttcgtcggaggatatacaacagccgctcgagctagctcgagcgtgttagacctctagctcgttgaagtcatacagttcctggtgtccataagtatactgccgtgacagtctttccttaggccgtaaggcagtccgtttaaactccacctatcctatggactttgcagatgtaggtgagagtggtaagtgttacatctctttgtcctgtatcgatggatgatgacacggaacaccctccaccttaataatattctttgagtttggcagtggaacaacacttgttgtcaagacctctagctcgttggcggctcgagctagctcgagctatttgatccctctgcttgaggaggggaaggccccacagtgtcttcacatgatacttgggatgatgaggtcccaacacgaccttagtccttagtgaggtcctttcatactgtgaccttcgtgttcctcgttaaccttaaactctgacgttttagattaatttttactaagacccaagataatgacacggtggaccctgtcccttaataatattctttgagtttggcagtggaacaacacttgttgtcagatccctctgcttgaaaggggctcgagctagctcgagctaatgtactcctacgatccaccaggtccctgaggcactccaccagctccggtacaggttcaacctacacgtcaccctaaggtaggactttcgtctattttagtatcggttcctaccgtcgtcgagatagaaccgtcatgacttcaacctctgtccgtagctcccgtacttgatgacgtgttggacccgggaccccgttctcaacccgtttttttagttccattttggtcccggaacaaagcttatcattacagtactcctacgatccatgtcggctcgagctagctcgagctgggtgaatttatggcgcacctgaatctaaattatgagccatctgacattatagtgaagttattgttcggggtcaagctcaaacgaatccactctttttgttctttgaactccgttcttgtttaaaagtttacagatgaagtcagaaatggtatttgaagtatcctttccttctactccggtaaatgatgacgtgacgaatcctggtatggtgaccaaccaagttctattttgctgaagggactaagctcatagtaacttcacgaatttatggcgcaccctgtgctcgagctagctcgagcatgttgcacgccgtttcttttccaaacaaaggcttagaatatttattacatgtcaagaactgttagagacgagttctaacgagtccacccttctgattctttgaactccattcatttttacgagtgtgaaggtgaaggtgaaacttttatttcaagaatctctttcttctactccaccacatggtgacacggacgacctaatccgtgtatcatcactaacctagttctgctttgcaaaagggactaggctcatagtaacttcggcacgccgtttctttgaacc

SEQ ID NO: 204 - DNA, 2925 bp, synthetic construct
  misc_feature 1..2925: note = TCRG 2
  source 1..2925: mol_type = other DNA
tgctgtctgcctatacatgtctgaatctaaattatgagccatctgacattatagtgaagttattgttcggggtcaagctcaaacgaatccactctttttgttctttgaactccgttcttgtttaaaagtttacagatgaagtcagaaatggtatttgaagtatcctttccttctactccggtaaatgatgacgtgacgaatcctggcttaataatattctttgagtttggcagtggaacaacacttgttgtcatctgcctatacatgtgcagggctcgagctagctcgagctaaccgaccaggatttcgtatgaagtcatacagttcctggtgtccataagtatactgccgtgacagtctttccttaggccgtaaggcagtccgtttaaactccacctatcctatggactttgcagatgtaggtgagagtggtaagtgttacatctctttgtcctgtatcgatggatgatgacacggaacaccctccaccttaataatattctttgagtttggcagtggaacaacacttgttgtcagaccaggatttcgtaccgatgctcgagctagctcgagcgaaactagcttgtccgaagcggaggggaaggccccacagtgtcttcacatgatacttgggatgatgaggtcccaacacgaccttagtccttagtgaggtcctttcatactgtgaccttcgtgttcctcgttaaccttaaactctgacgttttagattaatttttactaagacccaagataatgacacggtggaccctgtcccccgttctcaacccgtttttttagttccattttggtcccggaacaaagcttatcattacagtagcttgtccgaagccgggagctcgagctagctcgagccatctaccataacgtccacttccaaacaaaggcttagaatatttattacatgtcaagaactgttagagacgagttctaacgagtccacccttctgattctttgaactccattcatttttacgagtgtgaaggtgaaggtgaaacttttatttcaagaatctctttcttctactccaccacatggtgacacggacgacctaatccgtgtatggtgaccaaccaagttctattttgctgaagggactaagctcatagtaacttcacaccataacgtccactgacacgctcgagctagctcgagcgcttgggttctgactcgaatccaaatcaggctttggagcacctgatcttataacagagttgttttaggcgtcgagctgcgtcgtacccattctgttcgttgtttcacctccgttctttcttaagagtttgagagtgaagttaggaatggtagttcaggcatctctttcttctgtaccggcaaatgatgacacgacgcaccctaattatcatcactaacctagttctgctttgcaaaagggactaggctcatagtaacttcgggttctgactcgaattaccagctcgagctagctcgagccgatccccagagcttagacgggaggggaaggccccacagcgtcttcacatgatactgaggatgttgaggtcccaacacaaccttagtccttagtcagctcttttcatagtatgaatacgttcgtgtcccttctcggaatttaaatatgaccttttagattaacttgcactgagaccccagataatgacacggtggaccctatcccttaataatattctttgagtttggcagtggaacaacacttgttgtcacccagagcttagacgtagacgctcgagctagctcgagcctgattacggcactagtttgctgaatctaaattatgagccatctgacattatagtgaagttattgttcggggtcaagctcaaacgaatccactctttttgttctttgaactccgttcttgtttaaaagtttacagatgaagtcagaaatggtatttgaagtatcctttccttctactccggtaaatgatgacgtgacgaatcctggcttaataatattctttgagtttggcagtggaacaacacttgttgtcatacggcactagtttgtcaaggctcgagctagctcgagcttgtattttcgtggggtactccaaatcaggctttggagcacctgatcttataacagagttgttttaggcgtcgagctgcgtcgtacccattctgttcgttgtttcacctccgttctttcttaagagtttgagagtgaagttaggaatggtagttcaggcatctctttcttctgtaccggcaaatgatgacacgacgcaccctaatcccgttctcaacccgtttttttagttccattttggtcccggaacaaagcttatcattacagttttcgtggggtactctccagctcgagctagctcgagcccctgcttagtgccgtaagcccaggtccctgaggcactccaccagctccggtacaggttcaacctacacgtcaccctaaggtaggactttcgtctattttagtatcggttcctaccgtcgtcgagatagaaccgtcatgacttcaacctctgtccgtagctcccgtacttgatgacgtgttggacccgggactatggtgaccaaccaagttctattttgctgaagggactaagctcatagtaacttcaccttagtgccgtaagcaattagctcgagctagctcgagccagtgtatttcgaccaagacggaggggaaggccccacagcatcttcacatgatactgtagacgttgaggtccctatacaaccttagtcctcagtcagtcctttcgtactatgaataccttcatcttcctattcgacctttaaatatggaggttttgatttacttttacggagaccccagataatgacacggtggatcctgtcctatcatcactaacctagttctgctttgcaaaagggactaggctcatagtaacttcgtatttcgaccaagactcgcc

SEQ ID NO: 205 - DNA, 2922 bp, synthetic construct
  misc_feature 1..2922: note = TCRG 3
  source 1..2922: mol_type = other DNA
gcatcgtgttagtctaaacaggaggggaaggccccacagcatcttcacatgatactgtagacgttgaggtccctatacaaccttagtcctcagtcagtcctttcgtactatgaataccttcatcttcctattcgacctttaaatatggaggttttgatttacttttacggagaccccagataatgacacggtggatcctgtcccttaataatattctttgagtttggcagtggaacaacacttgttgtcagtgttagtctaaacagggctgctcgagctagctcgagcatcgtgcggacgagacagcaggaggggaaggccccacagcgtcttcacatgatactgaggatgttgaggtcccaacacaaccttagtccttagtcagctcttttcatagtatgaatacgttcgtgtcccttctcggaatttaaatatgaccttttagattaacttgcactgagaccccagataatgacacggtggaccctatcccttaataatattctttgagtttggcagtggaacaacacttgttgtcagcggacgagacagcatagatgctcgagctagctcgagctacgctgctgtccgtcctgttccaaacaaaggcttagaatatttattacatgtcaagaactgttagagacgagttctaacgagtccacccttctgattctttgaactccattcatttttacgagtgtgaaggtgaaggtgaaacttttatttcaagaatctctttcttctactccaccacatggtgacacggacgacctaatccgtgcccgttctcaacccgtttttttagttccattttggtcccggaacaaagcttatcattacagtgctgtccgtcctgtactacgctcgagctagctcgagcaatttgcagtccgcagtgatccaaatcaggctttggagcacctgatcttataacagagttgttttaggcgtcgagctgcgtcgtacccattctgttcgttgtttcacctccgttctttcttaagagtttgagagtgaagttaggaatggtagttcaggcatctctttcttctgtaccggcaaatgatgacacgacgcaccctaattatggtgaccaaccaagttctattttgctgaagggactaagctcatagtaacttcacgcagtccgcagtgatctaccgctcgagctagctcgagcggcatgcggtgcaacgtttaccaggtccctgaggcactccaccagctccggtacaggttcaacctacacgtcaccctaaggtaggactttcgtctattttagtatcggttcctaccgtcgtcgagatagaaccgtcatgacttcaacctctgtccgtagctcccgtacttgatgacgtgttggacccgggactatcatcactaacctagttctgctttgcaaaagggactaggctcatagtaacttcggcggtgcaacgtttatcgatgctcgagctagctcgagctgagcagtaattgcaccccaccaaatcaggctttggagcacctgatcttataacagagttgttttaggcgtcgagctgcgtcgtacccattctgttcgttgtttcacctccgttctttcttaagagtttgagagtgaagttaggaatggtagttcaggcatctctttcttctgtaccggcaaatgatgacacgacgcaccctaatcttaataatattctttgagtttggcagtggaacaacacttgttgtcaagtaattgcaccccacttaggctcgagctagctcgagcaatccgcagcagtgttactaggaggggaaggccccacagcatcttcacatgatactgtagacgttgaggtccctatacaaccttagtcctcagtcagtcctttcgtactatgaataccttcatcttcctattcgacctttaaatatggaggttttgatttacttttacggagaccccagataatgacacggtggatcctgtcccttaataatattctttgagtttggcagtggaacaacacttgttgtcagcagcagtgttactatctacgctcgagctagctcgagcctctagtggattgggctttctgaagtcatacagttcctggtgtccataagtatactgccgtgacagtctttccttaggccgtaaggcagtccgtttaaactccacctatcctatggactttgcagatgtaggtgagagtggtaagtgttacatctctttgtcctgtatcgatggatgatgacacggaacaccctccaccccgttctcaacccgtttttttagttccattttggtcccggaacaaagcttatcattacaggtggattgggctttccgtgcgctcgagctagctcgagcatgcttaccacttggtgagtggaggggaaggccccacagtgtcttcacatgatacttgggatgatgaggtcccaacacgaccttagtccttagtgaggtcctttcatactgtgaccttcgtgttcctcgttaaccttaaactctgacgttttagattaatttttactaagacccaagataatgacacggtggaccctgtcctatggtgaccaaccaagttctattttgctgaagggactaagctcatagtaacttcactaccacttggtgagtcatgagctcgagctagctcgagcgggctagatttgcggtggaactgaatctaaattatgagccatctgacattatagtgaagttattgttcggggtcaagctcaaacgaatccactctttttgttctttgaactccgttcttgtttaaaagtttacagatgaagtcagaaatggtatttgaagtatcctttccttctactccggtaaatgatgacgtgacgaatcctggtatcatcactaacctagttctgctttgcaaaagggactaggctcatagtaacttcgagatttgcggtggaaagtag

SEQ ID NO: 206 - DNA, 2939 bp, synthetic construct
  misc_feature 1..2939: note = TCRG 4
  source 1..2939: mol_type = other DNA
caggaagccgggtcgtcacatccaaacaaaggcttagaatatttattacatgtcaagaactgttagagacgagttctaacgagtccacccttctgattctttgaactccattcatttttacgagtgtgaaggtgaaggtgaaacttttatttcaagaatctctttcttctactccaccacatggtgacacggacgacctaatccgtgcttaataatattctttgagtttggcagtggaacaacacttgttgtcaagccgggtcgtcacactatagctcgagctagctcgagcgtcccgttgtccgtaattggccaggtccctgaggcactccaccagctccggtacaggttcaacctacacgtcaccctaaggtaggactttcgtctattttagtatcggttcctaccgtcgtcgagatagaaccgtcatgacttcaacctctgtccgtagctcccgtacttgatgacgtgttggacccgggaccttaataatattctttgagtttggcagtggaacaacacttgttgtcagttgtccgtaattggatttcgctcgagctagctcgagcttaatagttgaagtgccttcctgaatctaaattatgagccatctgacattatagtgaagttattgttcggggtcaagctcaaacgaatccactctttttgttctttgaactccgttcttgtttaaaagtttacagatgaagtcagaaatggtatttgaagtatcctttccttctactccggtaaatgatgacgtgacgaatcctggcccgttctcaacccgtttttttagttccattttggtcccggaacaaagcttatcattacagagttgaagtgccttccgcccgctcgagctagctcgagcgccaaataatagctacgcagtgaagtcatacagttcctggtgtccataagtatactgccgtgacagtctttccttaggccgtaaggcagtccgtttaaactccacctatcctatggactttgcagatgtaggtgagagtggtaagtgttacatctctttgtcctgtatcgatggatgatgacacggaacaccctccactatggtgaccaaccaagttctattttgctgaagggactaagctcatagtaacttcacataatagctacgcagggtccgctcgagctagctcgagcactggataaccttatgccggggaggggaaggccccacagcgtcttcacatgatactgaggatgttgaggtcccaacacaaccttagtccttagtcagctcttttcatagtatgaatacgttcgtgtcccttctcggaatttaaatatgaccttttagattaacttgcactgagaccccagataatgacacggtggaccctatcctatcatcactaacctagttctgctttgcaaaagggactaggctcatagtaacttcgataaccttatgccggcgtttgctcgagctagctcgagcgataatgcatttcttacgccccaggtccctgaggcactccaccagctccggtacaggttcaacctacacgtcaccctaaggtaggactttcgtctattttagtatcggttcctaccgtcgtcgagatagaaccgtcatgacttcaacctctgtccgtagctcccgtacttgatgacgtgttggacccgggaccttaataatattctttgagtttggcagtggaacaacacttgttgtcatgcatttcttacgcctagatgctcgagctagctcgagcagggttctgaagtgtgtaattccaaacaaaggcttagaatatttattacatgtcaagaactgttagagacgagttctaacgagtccacccttctgattctttgaactccattcatttttacgagtgtgaaggtgaaggtgaaacttttatttcaagaatctctttcttctactccaccacatggtgacacggacgacctaatccgtgcttaataatattctttgagtttggcagtggaacaacacttgttgtcatctgaagtgtgtaatgacttgctcgagctagctcgagctgtacctaccctatacgcatggaggggaaggccccacagcgtcttcacatgatactgaggatgttgaggtcccaacacaaccttagtccttagtcagctcttttcatagtatgaatacgttcgtgtcccttctcggaatttaaatatgaccttttagattaacttgcactgagaccccagataatgacacggtggaccctatcccccgttctcaacccgtttttttagttccattttggtcccggaacaaagcttatcattacagctaccctatacgcatgtctcgctcgagctagctcgagcaatagccctctggcttcgccggaggggaaggccccacagcatcttcacatgatactgtagacgttgaggtccctatacaaccttagtcctcagtcagtcctttcgtactatgaataccttcatcttcctattcgacctttaaatatggaggttttgatttacttttacggagaccccagataatgacacggtggatcctgtcctatggtgaccaaccaagttctattttgctgaagggactaagctcatagtaacttcacccctctggcttcgcccattagctcgagctagctcgagcgtccgggatcgagacgacttggaggggaaggccccacagtgtcttcacatgatacttgggatgatgaggtcccaacacgaccttagtccttagtgaggtcctttcatactgtgaccttcgtgttcctcgttaaccttaaactctgacgttttagattaatttttactaagacccaagataatgacacggtggaccctgtcctatcatcactaacctagttctgctttgcaaaagggactaggctcatagtaacttcgggatcgagacgacttacctgccgtgttggtccgtaggcacgaagagc

SEQ ID NO: 207 - DNA, 618 bp, synthetic construct
  misc_feature 1..618: note = Conjoined 1
  source 1..618: mol_type = other DNA
gtgcctattgctactaaaaagtttaatactacctactagccaactctcttgctagaaaaacaaagcgctattcgattcatgtagttgcccggtaaatagtaggttcatgtgaaacaatgccttgcttattatggacgtttcgatttcagccatacattaaaccataaacggcgcctatctaaccggattgtttctgcttacctagtttggacgtagttaaggactatatcacgcaatggtttctataaggttgtgtcgcccgggagacacttttaattccaggcttccggcattgagaaggacgtctacagtcgccagtggcagtactattgctattcacttacatgacgtgttagctgattgataggtaaagatgcccagaaatgtaatactgaactccctagagaaatagccgacctgaataactgcatatctcgatattgggtctatcatcgtacgaccaattcggtacttgctgtatacccatgccaagactatcgttcagtatagaagcgctgcaacctcgaagttcctcggtcacggtaaaaagttatgtcagtccgctgagcggtagaggatattatttattaagtcgtgatttagggataacagggtaat

SEQ ID NO: 208 - DNA, 618 bp, synthetic construct
  misc_feature 1..618: note = Conjoined 2
  source 1..618: mol_type = other DNA
gcaatgcaaggaagtgatggcggaaatagcgttagatgtatgtgtagcggtccctagagttagtaatttaagtcagtatgtttgtggctttccgtaggcgatttgagtggccctgacgatctccccgactgtagtcgttctctgtcaagatcaacagatacaacgataaagggtccggaataggggccggcagtaatgaactctgctctagcttgtagatctacctaactaattatttaaaagttagcattcagaaacaatagcggatattcttgttaacaacaagcggcaaaacttgagaacagccagatttagagtaaacggaaaagacttgagggtcaaagtggcggacagtttttttcggttgcctttatttatggataccagtggcaattaaggtatccactaaaatcatattagtggtttcttacgtcatcatgcaaatcagtaaaaaagttttgcagactttcggtctggaaaatcgccattttcagacaatctgttaactaacgcaagtctgttcgcgctgcttaagctataatcatgttgagaacaaaaaagcatcaatttattataatagggtgataatgcttagcgttatagggataacagggtaat

SEQ ID NO: 209 - DNA, 618 bp, synthetic construct
  misc_feature 1..618: note = Conjoined 3
  source 1..618: mol_type = other DNA
gtaatgggtataatcaattatgttttggcgaatttccactataaggctataattgcatgattgttccggctgccactctgataataggggcctaagttatcttctatatattatccaatctgctaatgctcaaaagaaattagatcaagtgtatgaccgagttggccaactcaatgatacacgttggacagctataggtgcatgtcaatgaatgaatcggagtggtattgcccggttgtactgatgtgactctgtaatgtagtaatagtcaaatctgatagtttacgttaaccttcccgccaggggactctaaccaactgttcccatgggaattgtcagcaaagagtattgaggtagtcagcagagcccgatgtataatcatggcagcattgctgcaatactccgcttttttacattagctgaagtattaataacctgggcttagatgaggatttcttactcgggaacttatgacgagcacgagggaaaaaccgtaagcattccgttagctataagggctataaaacacattactgtgtagaaggataactttgtcatcacgataagcgccgcttgatcagacatacttacaacagtttgtagggataacagggtaat

SEQ ID NO: 210 - DNA, 618 bp, synthetic construct
  misc_feature 1..618: note = Conjoined 4
  source 1..618: mol_type = other DNA
tcctaaactccaccaggagttttgttgctaccagttacgcctttattgaaaagaaaatatatggttctctactgattaaagagagtcacggatgattatatctccatataggacaagtaatgaagcactaaaagaggttaaacaaatataaactctatggtagatcagcggactaccaagctatcatgagactttgtgcataagaatatacaaccaaacgtcttaacgtattggtcctcactcattaattcttagtataatatctgacccgggaaattttaattttaactacggtactaatgttcgatgaacacaataagaagtgaagtaataattcctgataagtagtagcattaatgctggatgtcgagtacactacctataaggcatgtgaagttcgcacatctggacaatccatggagtaacgaacgcgtctactagggtaactattgctaaagatgtgaaacggtcctgtttcctattgagcagcgcgatactcatatcttaagccacctttattttattatgggcactgtaagtctgtacctgtattatgtttgtaagcggtcgaaaccgtgaaatacctggtacacacgttgctagggataacagggtaat

SEQ ID NO: 211 - DNA, 618 bp, synthetic construct
  misc_feature 1..618: note = Conjoined 5
  source 1..618: mol_type = other DNA
ccacgggctccttgccatcggtcgcgatacctcagatagcatatgcgaccctgaacatagtgcgatggcgcaacgtattggatggtaatcacggttcttgaaacatatgtgtggggattctcagaactgcttatccgtaatcgacggatctaaatttcctgctgacgacagtactcttaaaaatctacgggagttcggtattatgaagagagctggtgacgacacgacgcagtaggacaaactccttataagttctgtctgcaaattgtgatagatggggtgcttgcttgatccttctacaattagattcactctcgaatccgtgaataattaaaagcacttagcgacagtcacgaagataaatcactcttgacaacaaccaactatgattgtaactccggtttggacagtcttagggtcaataaagactgctttaaacacgaccttcggggatgtattatataacgatgacaccaccaccgcttatgtggtgaaggattgtagagagtgtattgcgatgttaccggatcttacgttccttgcagtcattttaacaagcggacatagagattcccgtcactacgagacaagacccgcgagtagggataacagggtaat

SEQ ID NO: 212 - DNA, 618 bp, synthetic construct
  misc_feature 1..618: note = Conjoined 6
  source 1..618: mol_type = other DNA
tgtcacttacctcgtttataaaattcccatcctacgtactctaactgcgggtctttcgtatattgcgaccctataatactaggcgggtctaaatcggaccttaaccagtgcagttgatcccgccaattaggtgaggattattattatgttaactaacatcccctcacattctagtcgcggataattattgaggattaccaagataatgtatatcgtccttgtttattaacgattaagattttttatactctttgatcacaaaaactccttgcatggacactttcttaagcgcgttattaaaatcctcatctaattgttgggcgacactccatcgtctatttgtggcttctgtaatcgacggcgtacgcatttgaacatataacattctttaaaggagtgtaaaataacacacgagactgttgcgtactacctaattatgtaacttgtggttaggagtatgccgaaccaaacgccttaactaattagctatcaaaacataactatatattgtggccctgaagattggaagaatgagtcgaaatgttaaattaaaaccttttatactttactctccccgccttgtatcgtttagacattttctagggataacagggtaat

SEQ ID NO: 213 - DNA, 618 bp, synthetic construct
  misc_feature 1..618: note = Conjoined 7
  source 1..618: mol_type = other DNA
attaaacttaaactcttttacgttgtcttacatatgtcgagcttatgcattattgaattgtgcacgtctgtagttatttaagcctacctcataacatcttacaaagtagatgggagtaacgcattcacactcttgcagatatatctctaagtcaaaggttgccgtcagttggttttcggagctttcagatgatattaaaaacacatagaattagatcctgttctgtatgctgctttaaagcagtaggctgtttagtaatcaaaatagacttagtatgatgcggtaatgttttattgtaaatacaagggataccataccaaggttctatttacgatcttctgtcacccaatgaatagtttgaggtcttgattaaataggaggataaagatatttccccaaggacgcggtgctgttcaagagacagcctacaaagaaaaaatttgcacagaagcagattcagagcaattctaaaagacatgtcgcctgaattaaagtagaatctccgaaaagctatcccaataccattaaaacatcatgtaacaggtcacctttcggttgcggggcagctatggtggccaccaacacagtatcgcttgtgcatagggataacagggtaat

SEQ ID NO: 214 - DNA, 618 bp, synthetic construct
  misc_feature 1..618: note = Conjoined 8
  source 1..618: mol_type = other DNA
aaatttgaaccgttcgcacttttgagaaagtcgggggctctgtgtttagacctaatatttttgcaaacggaagttgaaattattgctgttactccggacatagtctgagtaatttacatatagggtgatccagtaactcgtagttctccaagagtcggtcaaggcgggaattagggtactgggccaaaggcgaaagtttatgctaaaataagcccaatgacggcagttgcaaacctccagcaaacagattccttaggctacacaagaattgggagtgccaaacttaggaatatttaattctgaatcattatagtgaataataagtatgtatgagtatagtaacgatgtgaaaacagtgatgggccaacttacacaagtataatgactctgctcgtttaagagataccacttatttaagatactagtagaactttagcgaggcttagtaagatatatatattaatctaactagagggtccgcatttcctagccatcccttgcaaaatgtgatttggagcgtcgcaaaactgccatgtttctaacggagcgcactatataggattagtctacttctagggatatggacggtaaatttcgtcctagggataacagggtaat

SEQ ID NO: 215 - DNA, 618 bp, synthetic construct
  misc_feature 1..618: note = Conjoined 9
  source 1..618: mol_type = other DNA
cattcgacaatgttccaaggttttccgcatgatgccaatgtcaagaatcgagcgtacggcatacttagattcgatcgtacgcatctttaaggtcgcctatttagttaatattctgcactgacagttgggttcgctagtgtaggcgatataactaaccgcggttaaagacgttaaacttttgaggagagctggacgcattgaatttatcacattccgaaacttggaagggttattgcacactgcgacacaaaccatcacagttgtacaaactccttccgtaaaatttttacctttctcaacatgtcacgcggagatacctaccttcctcacagtatctcgggagggatttatgcgacgatgcagcgcatcaagggtaagataccacatatctaatatatcaataatgtagataccctagataactgcaaggggtgtattgtgtctggaattttttggcgtggatatatgctataggcggcgttaagtaaggaaagtattcttcgatatgtggattgtaacgctatctttcgacgaactaaagcatcacgtcactgtccatagctaagagtccattatagtttgttaccgcatgttaagcattagggataacagggtaat

SEQ ID NO: 216 - DNA, 618 bp, synthetic construct
  misc_feature 1..618: note = Conjoined 10
  source 1..618: mol_type = other DNA
gggacgtttcaataaagctatgatttttcacttcacaatacaatgcgttattataagttaatctgacgcttcggggcctaagatctatgaacttttaattagatattgggacggaacgaactgcatgtacatttaacaatgttatgggtcaagcagcgaatctcaatattacagttaatgtgaacggataaagaggtccaccatccagtaggaaggagtccgatatgtttgggccaatgttgatgggcgcacaaacttacgatcgatttttttaataaaagtacttcataatccccttcaatgtggcggtctatcgaggactttatggtccaatggtagataggttgtgttccgtcctcctgatgaggagtgcgtcaatcctgcattctctgcatacggatttcaatgtggggtgagccatcccaaagcagtgttactagaacgtaaaacctcgcttacacccatttggacccctgcttcgcccccaccaaattgtttgcagagtcagttaacactctacgcatagatgtctcattgcttaaagccagtaagcataactatagatcctcttccatcgcaagtttacatatatactagagatagggataacagggtaat

SEQ ID NO: 217 - DNA, 618 bp, synthetic construct
  misc_feature 1..618: note = Conjoined 11
  source 1..618: mol_type = other DNA
atgctcgaaaaaaccttgtagttcaatcggaaaaagatgtggctaaaataccttcattgtgactttagggaacaactcttacacgatcctgtaatgcagccatcagaacgtgactcgcggcacgccgcaagaccagaatatataccagtagcacggatacacacacgagaaataaggacgagttattagtattaccctcaatatatgcagggactcatacctaagatccagatatcgcgctgttatgcgtcggcggaccgttgttatacctaatagctggctacgtatccctcggtcaacgttacttgcttcaaagaaccataataaggacaagacctataatgtgagccgagcatctcaattcgtttgatagctctaggtatttctttaatgagccggcgtcttgaagtcactaaaagggaccgctgaggaacctatgtgccctttcatattcataatgacataatcatttcaagatcaattgttattgtacatataactttttgtgtgaagaatgtagagtaaaattaatgtaatagaaaagtactattagtgagtttcctctgatacatggtttccgttctctgtataccaatatcctagggataacagggtaat

SEQ ID NO: 218 - DNA, 618 bp, synthetic construct
  misc_feature 1..618: note = Conjoined 12
  source 1..618: mol_type = other DNA
ctaataggcgatgcaccgatattagagttgttaggacgacgttgagttttttatctcacgtacacctacagatcgtatttctaataatgaccccttaaaaactataagctaacttgtgcaggagggacatcttttacgtacatatagcagtgttaggcgcccaacacatatcgatcctgtttccgtaaagtcactacatggtcggtataggactagccttccatgatcagtataacattaccacttatatatcatgcgtcaatctgtggaacaaatataattagtctcacaaccacccacagaacgtaaatcaataaggttacagatttccacccttttttttatattaaccctacaagtttaattctaccctagagaggtaaatgagtttacaattttttgtgacatagtcacggtagagttcgtcgcatttcttcatgattaagacgttatcgattatacgaggtggtgagattgccaaattcacgtcccacgcccggatataattatgaatctccctgtctaagcgccgtccctcataaatatttcgatatccttgcttcgccaagatatgatagtaagaacactgttatggttacctagggataacagggtaat

SEQ ID NO: 219 - DNA, 618 bp, synthetic construct
  misc_feature 1..618: note = Conjoined 13
  source 1..618: mol_type = other DNA
ctacctgtttatctttacaaccgctttcccacataccgatactccaaactaattgtgactagacgagtgtgagttcttagatataacgttaactagttactgaagataagcgcctgaactttagacgccaacatgtcctcatatagttacacggattacaagatacgatggcatagcgcatctgtagataaacctctttccgcgctgtattgcatgtcaaatcaaggtaacatgcactacgtgatgtgtgcgtttcttattactaatgggaacgcgacaactgaactatgcatttggtttatttagcatatcaaaagcatggatcacattgtctgcaaaccaccctgatgacctggtaggtgataatcaatttattgtctacgctgatccgccaattggatgaagagtgagatcttcagcgaggcagcttgaggtgaacgtaacacatatatgcttctcgtgattgttaattatgagcctatgtgctccctacaaggatatttatatcaaatggtacttgtttatataagaagcgaactagctattgcaagattaatgtaacataggcacgtcgtatcaactgatttggaggcggctttctagggataacagggtaat

SEQ ID NO: 220 - DNA, 618 bp, synthetic construct
  misc_feature 1..618: note = Conjoined 14
  source 1..618: mol_type = other DNA
ttttatggtatcgtgatatcaatgtcgcgtatcatggtcgtttcagcatctcactactagcattaattcttcattatttaggtcgccttatgacattcagcgaaccattatacctaaggttagctatagcgacggatagcactcattcgacttgtacaaagctaccttgctagtgggggtatcgtagcaaggaggacttgctgtagttcgccatcgttaccttggtagctggttcgcgttttaatgtaacttccagcatttttaatacagaatccgagactctctataatgattagggacgaaagtattagagtacctggcctgaattgttttgtggcatgatatcgtattcagtcatctagtaaataggcgggattgacaaaatccaaagagattgacattaataatatcagaactactgtcaccacttacttacaagcaggactaattacagttcctaaagcctcgcgattcagacattgcacgaatttaagcacaaactggtacagtataaaaacctatctcataaacgatttcgtgttttgatttcggacattgactgagtcaagcaatacggctaagaactcgcaatataaatgatagggataacagggtaat

SEQ ID NO: 221 - DNA, 618 bp, synthetic construct
  misc_feature 1..618: note = Conjoined 15
  source 1..618: mol_type = other DNA
catttccgtttaaacgttaacagccgacccaatatgctatcatgcttctcttataagttccgtatcaagtcatataaaatcataacttcatcctaaccaggtaatctctcacttcgtacttaagttagcaagttaacctagcatggctaagtcccggaccgcacttttatctaaaaattcgtgtgaggaagatagtaacgtgctggatatacttatgggcctggtatagataagttttatactaccttgtacacacagaaatttgaataaaacagcgtagacaacgactaggctaaaagcccaagttgacgagaaatttttcagtatgagggccattcgaattttcatagaaaggaatccttgccgtgatagttcatatttcaagtaattaatgcccttttataggggtgcctatacggagtagtgaaaagttcctaaacaacgggatgactgtcgtaaattttgtaagaggtctatcgataagtaccacctaagcacataaaagttgggactggactgagatatagcgcgaaattgaataattttgacagatgcttccacagctatcatcatcacgactttgattataatatttgtccatagggataacagggtaat

SEQ ID NO: 222 - DNA, 618 bp, synthetic construct
  misc_feature 1..618: note = Conjoined 16
  source 1..618: mol_type = other DNA
gttctagctttgatggtatcaattcttgggctacgtgagagccccgtcatttcactaaacaggtatctctattatgatacacaagcccgtttccgcacgcatacggttcatgtcagatttttaaattaggtatatgtcgtccctctcgaatgatgggctagataacactagtgcctttctgaaacgatatttaagtgaccacatgcaagtcaaactaccctttgtcaaactcctccagatcaaaagacttcaatagcgtggatataccctacactgactgcggttaatgaactcatcgcgtatatatcaattcctctacatttcgtaggcgaatcttagccctaattcgctatttacgggcaaatacaaataaagggtgacaggtttcgcatgtatacatctagcaatgaatcgataattaggtcatccttctatctgtattctaggatacctacgttggagtaagggttatcgcgtactagtgcatagatagatgcgttaaggtagaagtcttgtcagcaattggtttactgtagactaaacaatagatgcggaatttatagtctgttgaccgtttcgttacaactgtcagtcagccggtagggataacagggtaat

SEQ ID NO: 223 - DNA, 618 bp, synthetic construct
  misc_feature 1..618: note = Conjoined 17
  source 1..618: mol_type = other DNA
cgataatttggggatgcatgaaaagagaatgcccggcatcatgtagtaactccgccgtcacattttagaccaattactctattgtattctaacgcgtactctttgttttgaatatgatgaaaaaaggcatatttattgcaaactatttaagtcatacctcaataagaatatgtgttgtctacatttatagcggtccagagcgatgaccaaatcgctttaaatcctgacgagtcaaaataatcaccccgtcataggggtttgatggtgtagtaacgctagacaataagcccttctaaacatacgatcgtaacgtttttaacagaggtcctacgacgttataatatgtcaaaaccttcacctatatcattctcagaccaattggtatcgtgtaggtattatgaagtagtcgtgataatcttaatttaacaaacattgacggaaacatgtgagggtagtctccacaactctctaccataagtctatttcttaagtatgtgtagttgaacaagccatgttgcccagaatcgaatcgaacgattgggacgctaagaatcagacaataaggagctgcactgaattatgaaagttgtcctattcatatagggataacagggtaat

SEQ ID NO: 224 - DNA, 618 bp, synthetic construct
  misc_feature 1..618: note = Conjoined 18
  source 1..618: mol_type = other DNA
tgatacctattagtcgatttatcggtgtagttatatcccattggcgtaaatattttcggggatatctgtctaagaccgaaaccgactaaaaatggtttgcgagctttaccacttaaaccgactgtatgtttagttacacttctgcttaatgtcactagataaaactctttatcggcaagtgcgatcagagctggataatacaatgagagtgtctactcttacacatgacattcgttttgggcatagtaccaactcaatttacggtacgtgtttgcggtagacaatcccaaaagatataattttaattttgttcacattccttataactaactatttggcgatactttagtaatttctgatcgttaggacaatggaagaatcagactacgaatattgcttctggtaatttaaggggagtcgtggtctatgtgctcgccttagttaatattagtttttggagcaagctagcgtatcacctgaacaggtaggtcatcagtaatttcatacgctgaatgtggcgagtacttcagcaacaaaccaacttctacgctataacgatattctgcttctgtgtgtttgggcagacactttaaggactcatagggataacagggtaat

SEQ ID NO: 225 - DNA, 618 bp, synthetic construct
  misc_feature 1..618: note = Conjoined 19
  source 1..618: mol_type = other DNA
aacgtaaaggtcttttaatttgtatcacgactaaaagtttgtcatgaggcagacttaagtggttacacttatgcgactgctggctcaaaccgattgttgtcaactatcgacaccttttattaggcactcttagagcgtaagggaactcctaattcactttgtttagaggttttacatcagtactttggagcgtttagatattcgtgaaggtgattcaatccttcatttcatgctaacatgctaaataaactagaactcatttactcaatgatttatatcaaagctccttgagcagtacatgtagctcaacacctgggacgatctatggaagaggtcgatgtcaggagatacttacgcttaagatgttcagaataatgaaggagcttgtcctaatgtatatcgcgcagccggaggcggctcataagccaatctcctgtattcagggttggcaaggagctttctgttgcctgacactttgctaaactttgacttatatctggtatggcttttgaaaagtggcctatttaaccggtccccagtttgaactttaaccacagactgttcacggttaaattagaatttgggccacacggatgacattagggataacagggtaat

SEQ ID NO: 226 - DNA, 618 bp, synthetic construct
  misc_feature 1..618: note = Conjoined 20
  source 1..618: mol_type = other DNA
tgatctcgccaagtcgcataaaactttgtaatgggcacagaacatactgcaattctacatataatactgtatatcctcaattaatgacctctgacttcatcgcgaagttatttgtagggaattatcagccttttaattaagggcacgcgatttcattttagcgtcggcatcgatatcctcatggcaactctgctggtggcaactttacattaacatttgtcagctaagaacttataaaacggagtcggattcgttaggaacagaaccttactttacagcacgaagctagtctttatcggtacgagtacatgtgagacaatctatcattgggtctttgaatcatcacgtttacgtaacaacattagagagtccaccgtcaatgatggggtggttagtaatcgtacttcaattatccgttggttatagagttaagagatactgttttcaatttggccttctcaggagtatgacgttgcgccaagcagtgtggcgtactatcaatctgtgaataaaccctatgtctgttatctattgactggagactgtgtaaattacaattggaatattggcgctttaccactaacgagaatggctaatacttagggataacagggtaat

SEQ ID NO: 227 - DNA, 618 bp, synthetic construct
  misc_feature 1..618: note = Conjoined 21
  source 1..618: mol_type = other DNA
tgtttatagttgaggaatgccaagagctgtgacttcgtataggcatggcataaattaatcggctcaattctagcccgtgatcactatcgcctagttcactttcgacttgtaatatcattggtaaagacgttttgactgcatgacgcatgaataccagggatcagatttcgcaaactgcaacttatgctattttaagagtcagctcaacatccgcatgtactcttacgaaacctaagggttcaatacggacaatcggtctagtcacaacctttgccgggttgcgacattatatctcttaacatacgcctattttcgaaattaaacggagtatggtgcattgaaatatcttacgcacaggaccgcggtgcatgattacggtgaggatgttttcgcctaaacgtcagtcttagcagctgaaactcgggtgcgccttagtcataggtgctcttacgtgagagcagatacttttaaatcctatttccggtccccgtggcgattccatgagccatgattatagcgtatttcctttaaggctaataccgcaatgataccttgaaacaatgggcactaatcatcgcaagtagcaacagtaagtaaatctagggataacagggtaat

SEQ ID NO: 228 - DNA, 618 bp, synthetic construct
  misc_feature 1..618: note = Conjoined 01
  source 1..618: mol_type = other DNA
gctaaggctatgtgggatctccattctccataagtctgtttcctggcttgatccaggctgtcaaccatcgagagcatgccaacatgaacacataggttagtacatcttcgtagttggatttaaaatgcggtggtaacattagcgcacttcatacctgcaataatccacgacgatcgtgaaccataacgttactcaaatggcaccggtagtataactggttgccccctaacacagctgcaaagatttacatattttcgtccattgcatttaacattaatctgtcatcatgcttctagcgaaattaacttgaagcgccgaccttcgattcttttaggtgctcttaaacataccggttagctaagtatgttctcaacgagcactatacacccaccacatacatggtagaaatttctatggtaattgaatagggttgtactgggagcacgtggagtgaaccaggctctgatgcagttatttgaaaagcataattgggactgacattagttcagatgccttggaaagtttatccacggaacgccacgactaaggaccgtgccactacccctattctgcgtttcatcaaaatcctcagtgtcgagctagggataacagggtaat

SEQ ID NO: 229 - DNA, 618 bp, synthetic construct
  misc_feature 1..618: note = Conjoined 02
  source 1..618: mol_type = other DNA
atcccacagtcaaggtcatggcacataacgcagctaattgtttatctctgcaacaatctcctttaagttagacttatccgggatataaagaatgactttaacctccccccgggacgggaagcaataaaaggcgggttaaaacaaatgaagggttactgtgaatctatatcaagaactcgtattcatgttgacctcctagtatctcgtagggatagagcattacccggctacggtctcatgcacccgttccttaaatgctaacctgtgtttcgagatgcaaacatgctagtgtgcagccaggtcttaggtttctgaattactggaccgtttcttctctttaaatcaataaccctaatcgagtacgagtagtaacgacaggttacttaatgagaaaacaatcgatgtcaaacatcaccttcgattagttaacgtaaagagaacatacgatcgaatgcaggacgggataggctggcttcgtttcgtatgcaatttccactacacgttactatacgcactaaacacacaaagatgatctgagactaaagtattgtgcttaaaacctccagacaaacaatctaaataacgccctagtgaaagacctagggataacagggtaat

SEQ ID NO: 230 - DNA, 618 bp, synthetic construct
  misc_feature 1..618: note = Conjoined 03
  source 1..618: mol_type = other DNA
aactggactcatgattaaggtctcgaccctgctggcctcaaccttattttattaagttttcgcgtgtaaataggtcctgactcttacatactcatattcctatatatagtgatggtggtcacggacttcagcctcctttaataatcagagtcggagtaaaatcataacccgctgtgttcatctttaaaggcttaaagtttgtgtaggtgtgcggctaaagacatatgtgcatccatgaaacttatgaatattgatttataatacggtgcaaactttcgtagtgacgacatctcttcatcattaagaggtctctatggatctccgagccagaccaggataattaccataggaaatcttgataatctctaggaactttccatagtagggagagatatctaccagacgcatcataccatatagggtttcagattattttcagcatgcactttgtcgttatacttcgtattttcgatcctcacaatcgattcctcacagcagcttaatatgggacgccgctataattctgtacgttcacaagaaattcgctaacgtagtaatgacgccctcggaaaagcaacatacgtagatgacggttctaagtagggataacagggtaat

SEQ ID NO: 231 - DNA, 618 bp, synthetic construct
  misc_feature 1..618: note = Conjoined 04
  source 1..618: mol_type = other DNA
atgtaaaatcgagaagaagtcagttcttgagctgattattacatatcactggctgcatgcagagcgaagcccgatcgtccttgtgtcgcagattataccttagggccgcaaataaattacaggttattagtaaatatattgagatgctgcttcactgtttataatgcgaataacatgagcgctaggattcttcggccattgttacatctgtccaggttgtcattcttaaccaatttcctatgctacatatatgtcatgagatataatgaaagacgttttagtcacacccttgaattgctcctctactggataatagccacgttctcgctaacactcgcattccaggcttcactctgtggagaatcggtacgaaagggtacgggcggtatataacatctattaatttacacgcggtcaaaacgtctgtgttactctctattagttttaaacactctcaaaagcacttccctatgcgatatacgcttaccgcgggagaaatgagcaacctagaacattaataggaaaatacaccttctgaggaaccaataaggttcgacttaattaaacccgtgccgacgttgtactataagttatctcatatagggataacagggtaat

SEQ ID NO: 232 - DNA, 560 bp, synthetic construct
  misc_feature 1..560: note = Conjoined 05
  source 1..560: mol_type = other DNA
ctttaatcttgaacttaaacacgaaatactacagaaaggaatttcgcgaacatttccatgtcaatatgcagaactgagcttaagtgctgtcgagcccccttttttgcgttgaacctgattctaccatacttattttgttcgtgtaccaaaaaggtcccatactcatctcctacttgcgtttcgattgccttgctgatttttagtgaatgtgggcgagtcgggtcgagaatactgattgatttcagtagcttgttagcctgtggtcgctccttgaaggtccaaccgcaactttggggcagacgttatattatatattttgctattggataggtgtctgtttcatgtacaacttaccgtaaatctatataattctgtgaacttcgcgatattgacattatgacgtcggctctgcattgccggaaggtgcaatgatgtattaccataatttaccgataataaccaacccaaccctacaaatgtcttataagtgcggagtttaacagcttgccttgatggacccctctatgcagtatcaggaactcagaaatcttagccacatc

SEQ ID NO: 233 - DNA, 618 bp, synthetic construct
  misc_feature 1..618: note = Conjoined 06
  source 1..618: mol_type = other DNA
acgtaactaatctattaagcgaactttagaaacgcggtaacaagtatagatgcatcttcgaaccttaatcgaactgaaacaaacgaagtagaagttaggtccgagttgaaatagcgcagtcagtcccaaacagaacattcaaggcaaagtagagcggtgctggcaaagaatcctaatactacacacaattccatttaatgtagccagttcatgtctcggcgccactgacagtacccacaggtgtcactcaagtatctatcacgcgtctcaaaaacaatatatattaagatagactcactgttattagacggattaactaaagtagggaacgagggttatatcacaaggtatctcattgaatgtaccatatatctctattgcagacatgaatctgccggagcgacatcaaaatagtatatcctcccatttgagtgaatgacgtagcaagcacgtaaaccgattttaaaattcgtgctaatcgatattaactttagcggcgagtttgacgaaggccgtcgatccgtgtattaatacgcgaggtgcagatgattatatggtgccaaaacaaatatatcttttcattccgttttttaacttgattagggataacagggtaat

SEQ ID NO: 234 - DNA, 618 bp, synthetic construct
  misc_feature 1..618: note = Conjoined 07
  source 1..618: mol_type = other DNA
catctttgatctccagagcttattgtagtttactcttagtgaagtctgggacggtaacttataatggactagtgtaacgaatagttataacagacggtaagtggtaagaagaggtttaagaaaccggttctagtagcctttaatttgggtatctatagcgagcaataagctaggcacgatcgcttaatcaattgacaatatagtagccgaaagattatgaagtcatggtattttgtgcatataatagttactaggactccatgccaactatgcaagctcacaagcattagatttaagaacacggatctatggtactgccgcccatcttgagcctcttactacgcctaacctttatttcactagtacaaaatatgggaggaagatacttatgccaagcattcgttatagacaggtctttgcgtcataaccaatggctctgcgtgctgtctgctcttttcaaggcgtctcatcgatacactgctcatgaaccgcaggatagcgttatctcttcgaagttgacgcaatatagtgcaaagctatcgacataggtctatgttatgacactaccgacgacacggttttcagactgcgtgaagaggatagggataacagggtaat

SEQ ID NO: 235 - DNA, 618 bp, synthetic construct
  misc_feature 1..618: note = Conjoined 08
  source 1..618: mol_type = other DNA
gagtcctcagagcatctgatgcattgcaattgatatgtctaagagggtacaagtcaagtgaatttaacgtcataccctatgaatgtaggtacgaataattaataactaaacatttagggcagcaggtctatctgactcagtggcgataacagatcagacgacctaagttgactagtgagagccgtaaataaagggcagaaatcaagattatttcaattttagggaattagatgcataaggcctccttgcttacggtaacgactacacgcacgtcagtcacaatctttataggtcacgtgttactgagaagtggatcaacatacaggtagccaatggggcggtaaaggtccttttatgtcttttggtgccaatattaccgtctatataaataagatataagatgcattctactcggagacaaatacttaaatccctcgaatttagcatttataagtagatctaccaaataatgaaaagccgtccgcgagtctgatgggtttaaggttatcaatctgcgatacaaggaggagatagggcactcgttcgttctaattgactaattcaccctcattaaattaaaataagaatatatcatacggttagggataacagggtaat

SEQ ID NO: 236 - DNA, 618 bp, synthetic construct
  misc_feature 1..618: note = Conjoined 09
  source 1..618: mol_type = other DNA
acaatgacaagatcgtgcaattgggtacgtatatcacggatctgttgcacgaggtaaaatagtactcctcctctctgcgtcttatgaatattaaacgtatcacagagaaaatacagtataacattccacaccctttgcttttcaggctcagaatgtcaaataaatttattcaaaattattgaacctttatgaacactactggactcaacactctcaaaatattttgaccaggagagatatgtacaggctatgaaaactacctttataacgttaaggttcggctcgggtggagtaattgtgaaaccacaataatgaaatcatacatcttcgatactgatcggatatttttttatgaaaaagaaaaccggttacatctaacatatgttttactccacgccaacataaacacagaaagaccttaattaggataatttctcggtataacaatgtcagtggctgacgtcttatcatggaaaagggggcttcatcgaacatcggtctctaatcttcagatgttaacttgattcgtatgagcggacttttttttgtatctacacctactcaccttaaataatctaaagcgggagtgatatttaaaggtagggataacagggtaat

SEQ ID NO: 237 - DNA, 618 bp, synthetic construct
  misc_feature 1..618: note = Conjoined 10
  source 1..618: mol_type = other DNA
atccagttttttgatgacacagatcggcatgtttgtcacttctgacttcgattaactgtaaatcccctaacaatatgtcgcttgggaaactgtgcttacaatgaagaagtgcaatactgttgccggatcacgcgaaccacataaaatcagccgacgagaatttggctaagtatagcataatggcgcgcaaaagcgagtcggaacctaaccgttctattgtcgaggttggagcgtaagcctgtttccatttaaacattaaatctgcatttcaaaaaatcattatttaagatccagcgtaaacgaaactaatagtagccatgatatggttcaactggtaaggtacagggtgctataccaattccattgaggttcatttcacctagcacggctcaaaatttaggttgggagtatcttatacaacgtttaattccaggcccatcaaacaccaatagtagaagacttggtataaatccgatcatcgtcattcgaaggctatttctcgggctgactgttgtatcctcccatttggcttaactgagtggcaggctatagcagggttctaggtactctctgataaaaatacacactcacttgtccgcgtagggataacagggtaat

SEQ ID NO: 238 - DNA, 618 bp, synthetic construct
  misc_feature 1..618: note = Conjoined 011
  source 1..618: mol_type = other DNA
gaactgatgtcgtttatgatcataaaagcagaatcagtcacgaaaaggttagtagccctcaaggcagttccgtgctttggttttggattatagggtataagctggcttattaaagttcgtgattcatgccctatcagggaagcatgtcaaccgattcgaacgggttatacgggcttcgaaatatcaaggggaatataccgaatacagagtcatacttatagtgtgtggatggtttgataacgacctcccctgggatatcaggttgattgataggcgattttagccagtattgaaataaataacgatgataatgcatcagaccgttctcgctctggatacacgttgtcacctttaagctgttatatatagtgagtctacaatctatcccgcgactttactaggtagtttgtttagacatgctctggcctgcaaggagccacttacatctccaattctaggtattacatctttgcgatcatgtaagacatcgtcggcaaatcaattagatagctttatcaccgaccctttcatcgcgagattattatcccgcttagataaaggatcagttagaaagcattttacgcgacatcccgtaggaattagggataacagggtaat

SEQ ID NO: 239 - DNA, 618 bp, synthetic construct
  misc_feature 1..618: note = Conjoined 012
  source 1..618: mol_type = other DNA
tgcccccttcttctatatgaaaactactgaagtgactgttagcatgtttagtggggtccccactgccgtagatatgttccatgaccctctacatcctccagtgaggaattttgctgggaaggaaatgttcgaaatccttccagaactagtcaagtcgcatgctattctgtgaaacagaaaaactatcccagtaatgagacagtaaaagagtaagatcgggcctgtagatcactggtatcgtcgagcgataacgcattaatttatgattcccataataacccgaactgcgcgcaatttgcaaatagatctgcttatgtagccgcaagtcaaaaacagccatgcacattgtttaagaataatcgtcccctatgatttgggaaattagctgatacttgaatctctattaggcggatctatacctgattttgtatcttaaggcatgatacgaaactatctggccaacattaactggacaaattatcaaaataaccgccattgttgagtatcagtatgttacaggtactggcgaagttgattgttttttatctaacatcttgtcatgtttgattagactcagtaaaaggtggttagcagccttaatagggataacagggtaat

SEQ ID NO: 240 - DNA, 618 bp, synthetic construct
  misc_feature 1..618: note = Conjoined 013
  source 1..618: mol_type = other DNA
ccatgatcctatcatcagtacattctacgctaaatgtagtcgaataaatgccttgataatcagtgttagagcaggatactgaacgtacaccgcgaataacaatttcccgagctgacagaagttgttcctaaagttttaaatgcagtgtatctgggggtgtacatggccttggcggaactagagtagtgtcagtatatattattgtccgcttaaaataagcagttaccgattaatcgagctaggtcaatttcaagtactaggattaaaaacatcaattttgcagattacatctcctataccccctagcaaagtctgttacacgtataagtcttggtagagtctctcactgacttcaaatcctttcggctcggtaatcatttgcgctcaatatgtaccgtcggtcaactaacctggcgcttagaactgagcaccatggctatgtggacataggaggaatttagtgttcgttaaaactgagcaatgaactgtgaatttagttattaaaccccacagctttacagctagattatggagatgatagtaaaaagtttacgtaagcggtttatataagcgaagacgttagtaccaacctatacttgatagggataacagggtaat

SEQ ID NO: 241 - DNA, 618 bp, synthetic construct
  misc_feature 1..618: note = Conjoined 014
  source 1..618: mol_type = other DNA
aagctcgtgtagacgattatcttgtttagacttcgtacatatgcaatgtaggtctcgaatagtataggcatttgaactccaactcccaggctagttgttgatcgctttctggatttttgggcttaatgtttgggcactataagatctaattgatttttttagccgacatcaattgcttagattatatcctggatcgacagtttcctatcgatagactcctgaaattaataaacttcaattaccttgccgtagaagctacacaagaatcggtatcccatcctcacgattatcaacccttcggagatcctttagaagtttacaccccgacgttcccaccggaccttacataggggttttgcgacgcatgtttaggttttgaaggtaaatgacacataagcacgaaggcatagtcatgtatcgaggtaaaagtacgaggtcaagattcacttcttaacgggccccggtatatcactgaatggataattcgacgaaattttcccttgggagtacacgacagataagaatctacctctactaaagtgttaagttcttccgtatatcggccggttgatttggagtcaaggattcttctcttagtcatagggataacagggtaat

SEQ ID NO: 242 - DNA, 618 bp, synthetic construct
  misc_feature 1..618: note = Conjoined 015
  source 1..618: mol_type = other DNA
cggattttagacgtggatgtatatcgttttccaagtatgtttggtatactgtctgtcctaagagaacggataggctgtactgctttgattacgtactataaatttatatgcatattcgtgggcacctgtctacgcgttaacattccgtatacggttagttgctacgaagggctaaatgggttggagcttcagtataatacaaaaattcaataacgctttcaggatttagccgagcgctttgcaaaaaatgtcaagtttttaggcaatgccagagtttccaaccttcttactatatatcatacagtacattcgggggtgtgagacttcgtacagtattgttatttagtcctatttttccaaattaactgtcgatctctataaacacagtgccatgaggaagaacacggattatgaaactggcgagccagagcaacttccagaaggcgcggcaagaacgctcgtcacgtcatatcggcgtaaacgtttataggcggtgcataacgacagacacagggagtgaagacatagatggcatcggtgttaactgtaaagtgtgattaactattagtccatatagagcactcaaatcattgtcagatgtagggataacagggtaat

SEQ ID NO: 243 - DNA, 618 bp, synthetic construct
  misc_feature 1..618: note = Conjoined 016
  source 1..618: mol_type = other DNA
tatttaatcgcaaggctattatggttaacaatacgatacgttacctcacaaatctcgtcattctcagggaataatagaatacttgctctaaatggacaggcatattacttacaatcttcacaatcctgtttaacaagcgcgtccctcacttatagttttcaccatgaataatatccatctcaacagaaacggatgattattagcaacgcgctatgtataaaacggtaaacgtacgatgtctctggcgagtatatagctatttatgacgtatatgtattgatcaggttcccaaagaccccttcaggagcaattggtttaatagattttaataataaatccagcaactttcggctggggaacactcccatggcacaagtcttcataaaactttattgacacgttcaatccatagacctagttcgctcgatcttacgcagtgacatagaatgcatggcactttctgtcagttttcggcgatataatgggggtcgcctggcgtcttagcacttactcattaatgtgtgcctttgatcctctatcgaaaggtgtgaaaaaagtccctttgagaaccatggttattccaccgattcccttatttcatagggataacagggtaat

SEQ ID NO: 244 - DNA, 618 bp, synthetic construct
  misc_feature 1..618: note = Conjoined 017
  source 1..618: mol_type = other DNA
cttgggtgagtcggccatgttaggcgtgtactgagtgcacaacatagctagcaaacctccggataccatagttggtaaaaagagaactttcaggtcacactaacatcgttgaaaattacgcactgaacaggtaggaatttgagctgctgatctgtgcaagaagtgtgcgagggcctctcgctacgatgacaaatgttacttgaattaatttttatccgcttcctgcgtctgaacctttatataagaagattgggagcataaggagcattgcgctaaaaacttaaagccgaaatcctaagttccaaatgaatatcgttaaaaccagcgaaactagaatgaaatactatcaaactgcgtatggtataatgactcgtgggtcttttagcattgctgttcaaagttctttttgcacatattatagaaaagtcatggtctatcttttgacactggattgcggctactgttgcagcaccgtatccacgtaaccgtaggctgtatcggggaagccatgaaccgccaggaaacgacacaccacaccaaaggttttgcaggatgtcatgtcgagtcgtctatgtatatgtaacgtaaactctaattgcgtagggataacagggtaat

SEQ ID NO: 245 - DNA, 618 bp, synthetic construct
  misc_feature 1..618: note = Conjoined 018
  source 1..618: mol_type = other DNA
tcgagtcaaattatgacttaatggatatggtagtttataatgtcgagtagtctgtacgtgtacttgtaagtgactatgatccaaaatgcatggattggttgattaaccgaataaacaaaggggtttctacccttcgtagttttgctatagaccacttttgggagtcccagatatatgccctgtagcaaaatactcgcagtatacacttctcaactgcgtaacattggttgcaagaaggggaggtattcttgatcttacgaactgcgagatgaaatggggatggtagtcaccaaaaccactccatcgtaggaaggtcttatatctccagtccaccatatgccatcgaatgttcgagttgagcggttgttgtaagtagatgataaataaaattgcttcaaaagccatgacccacctggttttgatttccgtctttccagttaggtgtcaatcccctcatgcaacctatctgagatatagtagcgccaataggtcttgtctcagttgcttttgtgttatctatataataaggcaagcaaagaaacattggcgtccgataaatcacggtccctcatatggttagctaccccttacaacctaatttagggataacagggtaat

SEQ ID NO: 246 - DNA, 618 bp, synthetic construct
  misc_feature 1..618: note = Conjoined 019
  source 1..618: mol_type = other DNA
tttatgttttatgaactagtgggatctagtatatagccaaagagtagtgtacttctttagaacgtattgtgacgaacgagctggaggacagtagttgcagtcatgaaagaaaaaactacagatcagtatgtctaacacaagagtttcatcaaagcgcctgtacaggagtcgtttaattccgctgtaaataagattagcaaagttagacggggtgcggaggttataccggtggtattaagttgctataacctatcgatgtacttatcatggtcgaggactcctacatggttttgcaaataatacactatggctttactactaaatgtttagagtccaattctctttaataaccacatagattctattttagtttcaaccatattatttctatgaattggggggggctgcggtaattctagtgaattacactgccaagatattatgctgtaaaaatccgacctagtcttaagtctcaagattcgtctcatgtttataaattcactgggtttacaacgaactctatctgctctatacgaaagtttgagtaaatctgtacatattactacttgggcttaaatatatttgattagtattaatgattagggataacagggtaat

SEQ ID NO: 247 - DNA, 618 bp, synthetic construct
  misc_feature 1..618: note = Conjoined 020
  source 1..618: mol_type = other DNA
atattccagatagctgagacaattctatgtttaagctgtatgcagatgtatcttttcagaagaacatttcccggttaccacaatgttgcctaagctagcgttaattctgggggttaagctgcgctcttacgcccccagtgattaaatgtaccacccttaacgtataatattgcgcaccgcagaaatcatgctaaaaactgtactggagggggcaaatttctttaaatttaaactttacataactcccaaaaagctacgtaccactctggaatagagtacaaacaggttttaagatgaacctggacattattacattagtaacccaagcattgcgcgctttgcgtgccacgttattaacagcgtaataggaaagaagttgggctataccaatgttgtctgttctgtttgagcacaaaagcaatcacttactcgttaggtcgccacagcaaagtatccgggagattgttttagactacttgtattaacttcccacctaagctatatctagcattactatcagtatccattattatagaacatatagcacgtacagacctctcgatcagaagtcatttttgaatctgccagcgttaccttttgtagggataacagggtaat

SEQ ID NO: 248 - DNA, 618 bp, synthetic construct
  misc_feature 1..618: note = Conjoined 021
  source 1..618: mol_type = other DNA
tagctataaagtccgacgtccgcggcgccctcgtaatcttttcactcataccacgtgaattattatagtcccatgaaagaacaaactacgttaactagtggcacaatgtaaaagtccagcagtcaatgactgcttcgcatggtagcgtgaacgattatgtcattccatgctcacatgccaagttcaatagccaataagcgacgaccgggcctggtccaatgtattcatcattgagttggattgacgcaggagagtataatatatgtgacacttgtttcatagtctggactattttgggatacacaccccaccgtttcttcggaaccgtaagatctacaagagaccacgttattaattcttatttcatagtcaagaggagcaccccaatttacgcaaatctcgtgtttgtcggaaattctgttccaagtgaggctccgattaggttggccatacatagagccaggtctactgagtaaatatgtcatagcacatgagttgtataagatcctagcagcggtgcgcccaagcattggccgttagtgtacattataatattcagctacactatgcactataaactgtctgagacaaaagatgtggtagggataacagggtaat

SEQ ID NO: 249 - DNA, 618 bp, synthetic construct
  misc_feature 1..618: note = C1
  source 1..618: mol_type = other DNA
aaacaaattggcgtgtaagtacgcggtaggtcacatctctaaattagtccaacagaagatccccaagtaatggggagcgccacaaaaacgtgcataaattgtcagcgcgaatactatagatgtaaacccagactacagagtaaaggaaatagtatttgtgtatttctcaaacaaacgatattagcacttgtaatgctgacgagggagcgcttatattacttggtataactcatcgatctcaaatagaacaaccatccctatgttcaatttgattggagtatttaacatgtgagaaacaatggaaatctcaagtctcagtgcaactataaagttatctgtacatgacaatcgtagactactctaatatactgcttgtggcgaacaggaattgccggaaacatcttagtactgaaattgttcttctgtagtctttatgggtgcggataatcgtacggaagccctgttagaagggagcgcttaatatgaaatctaacggccgggatcgactgtaggctttcacaagggctataattagtggcaactgcgtccccgcctaggtacaggtcctccagattgagccccgttttaggacgatgatcctagggataacagggtaat

SEQ ID NO: 250 - DNA, 618 bp, synthetic construct
  misc_feature 1..618: note = C2
  source 1..618: mol_type = other DNA
ttttcagcagtcaataatgaatccgcaatgtacatttacaacgttacatagatttagacttgagccggggggtaagtaaaggttttatattcagtctacgcttggttatcatagactaatagtgcaatatccagctgatcaaaacaagttcaatgagcaaccctaccggtacatttactgagaattgtttctaactccctactgcaaccaaaccatttggtattgtttcctcaagtaatcgagtttattgaatgttgtggacaattagccacgcggaaatcttagtagtgtctacaaccctcatatgattcagggagagtccccgtggcgcagtgataagcaatattgacaaatgtttcaacgaattttatattacccgaggcaactgtttacttccgcctttagcaaacaagcgcttcagttgtggtcctagtgtggccattgaaattagcgcggaactgagcagtatacatgttaaaagacgagttaatgtcacgtatcaacccttagatagaggtgtttaacttatggtgtgccatggagggattattaaaatccgcgtgaattttgtattgggaccattcgcggtagcatccaggctagggataacagggtaat

SEQ ID NO: 251 - DNA, 618 bp, synthetic construct
  misc_feature 1..618: note = C3
  source 1..618: mol_type = other DNA
acgttagctgcattagcgtatggtgcccaactgtaaacagcaatgaaattagccaataatatatctgggtggcttggatttcatgctcccaataaatcgttttaatgcccatcattattgaatatatctgctagtatcaaaggtaatagatggtaattatattcaacatcactatcatgccccccgggcacgtctattgcaggacagcttgtaatccttagatttgggaatgacaggcatggatctcgatatatctcatgcttacagaatggcttgtgtattcgtaagataaactatgcaatggcgaaataggctctgaaacccgagaaagtgatgagtgactttttatccattagcaattaatcaagtatacggaaataaggtccggttgtcggagctgtgaagaataacttaagtgaaggcactagcgctcgagcgtgatcctttgtatacttgagtgagaatttagtgataggagttctgacatggtcgtgaagtggtgacctgtaaattcgatattagcaacaatccaatataacaaacagatgcgtatactttggtaaagcgtaatatcttcaccgtctagtcaagctagttatttagggataacagggtaat

SEQ ID NO: 252 - DNA, 618 bp, synthetic construct
  misc_feature 1..618: note = C4
  source 1..618: mol_type = other DNA
ccacaacgatagaggtatcgtgtgatgtgggccaaaccctttcagttacgtgctattatatgggtcgtatcgaattgagcttacagtataaaggattagcaaatcaaacctacatagaatacagaagaatgtgctgagtctatcgacgtattaccaaaggtgtaagaaagatctctctaatgtataacacatcatatttgttaggagtccagtggaccatatcccccacagtgtggttggccgcgtattgaccctagaaatcgtggccgtatgtggtgaaggattgctctagtctaccgcccactaggagagatcatcaaaatagcgcgatgtaacgttgttataccaatagttgttttctacttcattctgacgttattgtaaatcacgtttaccttagttattgaccttctgtaggcatacctagggaacttatcagtttgaaaccgctggcgaccagcattagcgtagtaagtaacgttttattgttggattttcataaatatcggtctaacttctgccagggcatgaaatatcccagtctatatataaaccgtaggagtgagagctaattatagatccaaattagaccattctaattagggataacagggtaat

SEQ ID NO: 253 - DNA, 618 bp, synthetic construct
  misc_feature 1..618: note = C5
  source 1..618: mol_type = other DNA
ggcaactgtgcagtacatactagtagattgtccacaagcgatcgacctgaacctacacggtctataattcgtcggagaattgtttgtaacatggattcaggtcgtcgcccgcgttaatcagtgagttaactttaatgcgaattatgaggcggaaaatagaaacatttacatctaaggtattccgtttccaacgcttataataagataagatgtgacactcagcagtaggcaaggcgagtcagaaacgaagttaaggtagatacttgtatacagtagtagatactagcgcaagagactaaggcctttcgtaatatgaatctttagtttttgtgctaaattactcaacgcacatcatgtttttcatgtgtgctttgtaaggctgtgacctaatatccagtccaaatcgtgttctgtgttcagtacctacgttattgtgagaaagacggtcttgctcattctctgccccgaaaggaagtctggttataggtgatcaacatcatgcgacatctactctccttaaattagaggatgggaataaatttgtgcttttaacgagttttcataagacaagtgctgggtagatgtggacactttacacactagggataacagggtaat

SEQ ID NO: 254 - DNA, 618 bp, synthetic construct
  misc_feature 1..618: note = C6
  source 1..618: mol_type = other DNA
aacataagctatgacaataggtatcgtatcactttagtctacatcatagcatagcccacgtattcagactagtttaacagtgggatataattgtgcttcccttaacatatgcaaagatctattccaagagggatatagtctattaaagatttcgtctactaactttcgacgtaatcaatatttccaatacttacagcctattcggggttttaagaagaactgacaagttactaaggaacgagaaacacattcaccatcttgagcagaatcgatacatgtcacttaccataacaacaacgtagatcttgctgggcggatatggtaagtacacgagtagtccagatctgcgtcgtgacactttaacctccattttttggacaatgcttctatggaaaactattcacgaccaatgtagttaaaagcaaagcaatatcatgtacttcctgtaatctgttagagaactttagcactaatttatcaagcgtacatgtttacatttatggcaaaatggttaaataattcagttatatagctagattctaggatttatctgtccaatataaacaccgtaaatatcatgatgttcacttttgctaggcctagggataacagggtaat

SEQ ID NO: 255 - DNA, 618 bp, synthetic construct
  misc_feature 1..618: note = C7
  source 1..618: mol_type = other DNA
accctttatgatattgtcggaggtacagtaaaggtgtacttcatactaaattcctgtttatagatcgaccagacctatatctattcagatagaggccttccgccatggacctttatgggtttattacgagttccctcaatcactattatcttattatgactcattactaagacacaatgatttttccacaattaagactgtgacttacacacagatatctaattaagagagaaagttgttcaggtcgatttttgaatccatagtaatatattctaacgttctgttcttgaatgaacaactacctttagccgcaaaacatagttggtcggatcaataaagtaggtgatatgagtcatgagcaatatcggagaattgcccaatatctaggtatttatgctacatagtcaatttttaatttgaatggtattggtaagggatctctttatgacagaagcggcttcgcgcgaacgacacacaattatacgtgactggcggtttcatgactacaataccgggtaaagccgattgatagccctatatcagtcgaagaaagacgcttcaccatattaaaagtataacttcattaatcgtgcttgcaattagggataacagggtaat

SEQ ID NO: 256 - DNA, 618 bp, synthetic construct
  misc_feature 1..618: note = C8
  source 1..618: mol_type = other DNA
aggggaattggaatgatatgacgttgaggggcccaggcaatcgtagattgtgcatagcactaagcgaagcacaaatccaccgcaactacctcgcaagtattttaatcttcaggttcttttgtacgtgcgaatcaaaagttcaatattatatttaacttctgcggagtgctgaatcgggctgctagaataccgcaggtccttgtttcacatcgacggatggtgggatgtacagggagattcggattgatggcgataataaatgtcccgcttgagttcactactgttttacgtagtttaaagtttttcatttgagtagatgaaacaaggacatcaccgggctacagtctgaagttatactaatcgcctgatttacaaggcatgtatacgagtcagactgtataaattcggcatcaccctgtacgcttattgcagttcaaacacgctaagcagcgtggtccgacacctagcattagatcgagattgtaacataaggttccattgtctacggttgaggtttagcactattaaagtcagttgaaaatgcctacgagacaattgttacgttttattcactggagagtcactagtatctatgaaagttagggataacagggtaat

SEQ ID NO: 257 - DNA, 618 bp, synthetic construct
  misc_feature 1..618: note = C9
  source 1..618: mol_type = other DNA
ttatgatggctaccccttccggtactcttttgtgtcagggataatgaaaccaaaagcattgccttagcctgacagacccaccccagttctgggaatcatttaacatcttacatgctctcaacggattttaagtggtcatataactagcgttcgcccttctgatgacgttagtagtaaagcaacgaggagtggatttcatgtacctggcgtcgagctatttgcaaaataacagtgttccttctcaaagtcctgattgtttacgcataaattgaaattttaggagaatgaataattgaatgatctatatattattggatcgctttaaggtttgcgattgttgattactattttcctcgtgggacgttcgttgaaggagtataacgagattcctccgttctacctaaactctacccgatgctgacaaaacgattaacgatactgagatggagcggatagagcttttgaagtgtggttagatgtggcgttcgctcatcgcagtaggtttctacctcttatactacgatatacaccgcagagataggtggccatcattttgaggctcacctgggattcatatggatgatcatagctcttgagttatagggataacagggtaat

SEQ ID NO: 258 - DNA, 525 bp, synthetic construct
  misc_feature 1..525: note = C10
  source 1..525: mol_type = other DNA
atgatattcataaataacgtaagcggtatagatttatattgttgatcgagcttatggggaactgagtgtagatataatccggatattgaatcatatcgacagtgatttgcgacgcgaccgtggatatttatatctttatcaatcggtcccaagaatcactaactacaacaattattcatgcctgttgaatctacgtgtttggcgatatatattaccgttcgcgcattttttttacttttattttaccataaaagttgctcctacgtccgtcttttacttatattaatgcgcattaccctgtcatgagggaaggaggaaatagacggtagtcagtgacctatctaagtgtctgttactttgccaggtcacagcaagataaaattattgcctcggttgactcgctgttacatgaccttgatttcgatgtttgcgatggccaagcgtattgtaatttcatccgcacggtgactaaaatcaataaaattctgtcgctgtgttataaggaactagggataacagggtaat

SEQ ID NO: 259 - DNA, 618 bp, synthetic construct
  misc_feature 1..618: note = C11
  source 1..618: mol_type = other DNA
gtctttaggtgtagtgtcctttgcattcatcttcccccgccgtggctaacgatctttgaatacctagtaatattgtaatgacgagatgattcactatgtaccccgagttacgtgttttttgaaatgtcttgatgctagtcacggactcaagctgtgatagcatacaacgtgcttaggcacaatccatcgctacaaagaacgataattctgttatttgatacaatgggtatgcttacggacataattcataaacgagcactaaaacttacattccgtggctaggaggttctggaaactagccagcgaatattaacatacggagaatattcagctcaaaataatactcgggaatgattacatggtaatctcagtagtgctaaattacacaaagtagtcttgttaacacgcatctaatctgcatactaactacagtaagagtatgtgtgattagctctaagactcaatcaacagtaacttaaaaacatatcctaccaatctcgatatctgattctggatggttgttacgggaaaggggttaactaacagtccttgaagccgaacattgtgattggctactaatgtcgccgtgtcctgtgtggatagggataacagggtaat

SEQ ID NO: 260 - DNA, 618 bp, synthetic construct
  misc_feature 1..618: note = C12
  source 1..618: mol_type = other DNA
acagatcgatctgcttaagtcgtctggcgactttgtaccaaagaaggcactatccgcctctaaaaatcgcactagagtcgttatagtaaataaatttatcgctttatgtcgcatcacgatataaacttcaatactcttcgatcgatataatgccactggatcaagagtatatttgccaaaacgctagtagtttcggctattatcgaattgtatccataaggaatagatacaaaagaagtaatgctcccgtaactttgagccggggaataggacgttcgataggcgacttataaatatttttgcatctatttattctaatcccacatattatgtacccctcttctttcttggatcagtcgagtctaaacgatgttttagctttttgtatttattctgcaccctacagtattgtgatcgcaattcgactcaatctttagaaaaaaatgtaagcaggtatatcgttccagagagggtggagacaacttgggggtaatcttattatactgaggctcttgtctaggtatttcgtatgagtttattgctgattcttcaatcctcacctaattcttaaatgagaagtgttaaatatttcaccatcgatagggataacagggtaat

SEQ ID NO: 261 - DNA, 618 bp, synthetic construct
  misc_feature 1..618: note = C13
  source 1..618: mol_type = other DNA
ttaaagtccgcaacgcaatacttgtctgtagccaggaataacgaatatagtcattggtgtcgtttagcttgtgataattcaaatatgtgagtgcgcgatgacccgaaaaattgtcctgaatcgagcattcacaacaaggggggggcgcaacttgctattactgtgtgccaataatagtctccgctacacagtaaggtgcatgaggaataaggtaattcattagtctttgttgtagactctaaacatcataggctcaccgttccttttaggtttgatattcagttctttaagtttcatgttggctatccaactgctgattgtctctaggattttataggaccgagagttcttagcggctgatagcctcgaagaatgagttagcgacatcgtcaagtccgtgaatcctctgtagttagagtatgttgaatgagatgacccaactactcagcaacccaacgtgtccgaagtccaaaatagttaactagactaatattaagcgttttatgtaattagagtaacggttggtgactcactgattaaagcagatgttaggacaatcactaatttctaaagagctaattctaaccgtacaccttatcatagggataacagggtaat

SEQ ID NO: 262 - DNA, 618 bp, synthetic construct
  misc_feature 1..618: note = C14
  source 1..618: mol_type = other DNA
aatacgtacccaaaatccatcagcagggtagaagtacagtggataatacgtaatcatgtttgtcgatgagccccgactacttactggggcacatcttaatttgctaaatcatctatttggctaaatagatcaagtacgccaaggactcatttgggccgcggaggtcgcggctactagtctccattcgttttaagacagcctatacttccgtgacatcaatcgtatttgataatggtaaatgcaggcggccacttacgattagatagatatttagggacgcgcccaatctaatattacctctgcactcaggcagttatgaaatcagctttaccaggaacactatggtttcgcaaggctccgcccaacaatttgcatactgtattcaggaacgcggtcacatagctgggagaaggcactaacgccagacccgcagattagcttttagtgtacgtatgttggcttgctttatgtaattatggactttctgctatcatatgctagttgcgtattgttgagggtgcaaaggcgttttgacgggatgggcaacaaacaccgtagatgaactaaagggacattttaattaaaggggtgaagtcttattagggataacagggtaat

SEQ ID NO: 263 - DNA, 618 bp, synthetic construct
  misc_feature 1..618: note = C15
  source 1..618: mol_type = other DNA
caaatcatgcaacgaagaaaaagcacatcgtggccctccataacattatttagttaatcatatatcggatgggtcgagaaaaaatacgttaagtagagattcttctatggtttagacgagttcctgttcgaaagcatatacttgaagcgcatggtgttgatgtgatgtggtaacactagctccgcatcagaatatataaagggttcgtttccataacaacctttaagttaccagagccttaggtagattatcattagtgctctaatcaggtaagcgatttacgctgttcagacgttaccccttcccattacaattacgcctactcataatattctggtgttttattgaaaattcctaggaagatcttaacacatgtaaataagaaaaaataagtttcgagcccaagtagaatatccaagcaatcagactatatgaccccatcataaatgacactgtcgatgcaacgctcccggtcctgtgcgattacccaaccagcactttttaaagtattatcagtgtttaatccaaagcagaattgaacttggtaatttttaggacgtagaccctttatatattctacgtaatattactctaacgacgtagggataacagggtaat

SEQ ID NO: 264 - DNA, 618 bp, synthetic construct
  misc_feature 1..618: note = C16
  source 1..618: mol_type = other DNA
ttgcatgacaactctatggcttccgacaaccctatggattctagtcagtgtgtatcactatattgactgttgtcagaacacaggtgtgtttctgattcgtctgtacatatctgcgaacttgaaaaccagatagatataccgatttagctccaacgacactgctgtgccaatttacgttaaactagtgatctataacagccatgggatgacttagagtttctagcacgagagtcagtcagttcagatgaaaccttgaataatagcatcttggtcgcaacttccaaaacgcaatctcggaatcaaaaattccaacatacgtgataacagctgatcgagcctgaatgcagttggcatattgtcagatgcaccgactccatcatatagggttttggtgtattattacacgtgcagtcttaaccccacaaatcaagaggttatatcatacaacatctattggtgtattgaaagatttcatgttgcacacggatacacggttggtatcgcggatgctgccgggtgttgcaaaaagaggtggtaatgaaagataacagacataatcactttttgtcaagtaccatcgttggacattaactcaagagatagggataacagggtaat

SEQ ID NO: 265 - DNA, 618 bp, synthetic construct
  misc_feature 1..618: note = C17
  source 1..618: mol_type = other DNA
tcatagcacctccaaacctactgatatttgtaaaccacgtctaggcaccccatcaattcgtgcgcccaagactgcgtgattgttattgtttgagtctactgccgagcgcgggtatccgtgagagcttgctcctgatttggtgattactattactaaaacgtggtatattccgaatctcggatttcccagcatacttcgaatgagggcagaagtcgccggattttgcttttccctttagttacatgttcctgctcggactctactcaattgtaatattacgagataacaggtaacgaatgtctacttgaactatggctaacgttagaaataatacccaaccgattcttaaatcatgtctgaagttcatgctatgttggagtgaacaggctcgaaattcactgttgttttacaaattatgcgggtaacccaatatgagtgctagcaaattgggaaattgaatagtggtttaatctttactcaaggcaaatctacaacggattgcgagtttcgcttggatctgcaccccatggttgtcgaatatctcaagaaggagtgcttactccttattatttatccgtattccagtaatttgttgttagatagggataacagggtaat

SEQ ID NO: 266 - DNA, 618 bp, synthetic construct
  misc_feature 1..618: note = C18
  source 1..618: mol_type = other DNA
gggcgaatataataactccgagatagatcttacagatgatatatctaaacaatctataatcagtcgagaacgaatatcataaagggttaattttaatctttaacagtgaaactgaaaaactacgaagagaacggcagagaaagcaggatactgtctaccttaattctacttgagctgccaatactttgcatatgttacagatttgtttgcgaacatccgtttcaacaggctccagtccttatatagcagaggaactaacgcttggacgctctcttgatctatccgtgatctgtcactgtaacagcgacaatgtgatataaactgcctataagagcctcagaaagaaagagtttgagttaagagcaaacttacgtcatgtatcgaagaaataagtttggatctcatactaagtagagcacgtagcaaactataaacgccagtttgatagttcgtcatctgaccctgccccagaggacattcaagaaccccatatggccattagttactgaatgcaaaaattcatggtgtgggtttactcgaaataataagcaataatgtgacaatccataagtgaacttaacgccgtattcattaggattgtagggataacagggtaat

SEQ ID NO: 267 - DNA, 618 bp, synthetic construct
  misc_feature 1..618: note = C19
  source 1..618: mol_type = other DNA
gagtctcaactttcttctagcggacgaaagcatttaccttagattttgcaaggtcacatacatcaaggaccaaggccgagatgagagtcgatggagattcgactgcttgcgtgaaagtacaaatgtgtggtaaatcatgaccgagggcaagagtcgtcgcagaagttatccgttttccgtgtaacagagtcttggtttcttttgacagtacaacgtaacgggacgttgttttgcggctctaagcacagctgttaagccgactatacaacatatgcacgtgttgcaaaagaagccttcatccttcccagatcgaactcttatcgctctattagatgggctaaatatatgcaggatgagtttgaacctgactgctttgtaccctggttgaattgctctctatgtcttatgactttcacatgaacacttaagcgcaaccaaacttcgaaatagtgcttgcatattgattatctattagtattacgtcgtcgtagcgatacgtcattcaatgaaaaaagattggaaatagttgggtgagaacatgtgattggatcagcaaactcttaatcatacttataagcagaaaccgtgttgcgctccaaatagggataacagggtaat

SEQ ID NO: 268 - DNA, 618 bp, synthetic construct
  misc_feature 1..618: note = C20
  source 1..618: mol_type = other DNA
aatgtaaccacccaaagtaaaagactttgattactgagagtgggattagtagatgtataagataaacttgtagagctggctgcttcttgcaaaccttgggcgctgactaaacactactatgattgtctctggcttttttaaacggtgaaaatgtatcgttgctgtgcccactatgggtaatgacttagcacttccggccagtttacacctagtgttactcaaaagttctttcgaccgacctacgagggcaaaggatgccttactcaatgcgtaaaaatcgcgtgagtaaaatcttattatgaagataaatgtccatacgagtccagcgacacaatacagtcactccatgctgcctgcttcgtatgcaaatggcacatagtgcatagccaattaagcctgtttaactatgagttaccgaacggtagcttcacaatactaaattctatggattcatgtcacgataggtccagtgacccaagcagtggtaaacatctgctatatatttggtctttgaataaatctttgcagcaatcccaagataggtctatattacttacaagacagaagcatgtgttaaatagtctgtctttcaatgcaatctagggataacagggtaat

SEQ ID NO: 269 - DNA, 618 bp, synthetic construct
  misc_feature 1..618: note = C21
  source 1..618: mol_type = other DNA
caaagaattactggatacatgatgcacctactcgtttaccctacaaaaacaatactcgtctggatatagatataagataatggctataattaaagcaagtacatatgccccaaatgatgccagtaggagggggatcatgtagtttgtgcaaaatcacgaacgaacttctgatctctatgttacaaaagtatcataatcatacgaaaactgatttaagcaattagatatatacgggattattttatgggggaatgtccatgtaagcactgtcagttggagtgatgaaaagaatgcgtataatatcatgaaaatttttatttccccacggttcgaattgccatcatgtcgtagcatgatgctgtaaaggaggtttaaatcgtgcaattcattgacagaatcataggttattccatgtcaccttacccggataccatagttcccaactcagacaagacccaaacctaattgtctatcgtaactcggccgccgtttgcgtgggaactaccgacttccgcttaaaagtttcatacaaattcttggtcttatacacggattaattgttctgaacggtgttaatagatcccacagtaaagatgcggttagggataacagggtaat

SEQ ID NO: 270 - DNA, 618 bp, synthetic construct
  misc_feature 1..618: note = C01
  source 1..618: mol_type = other DNA
ttatttatttttgagggttacgatggtgaacctgaccacggatatcttatcgtgctccagctcgggctgacgtacgcatgttctcggtactacacgtatagtgtcgaggctcctgtgtccaatttcaacagtaatataaatctatgtgcggataggaaagactcccaacgcgtgaccctgtgaacgttgctttcgctaaatacgtccatactttacacagaacgcagttgatcgaacaacggacgccggttgctcctacttctaaaattagctgtgttaatcttaatacgatatttgttttcaaatattaaacagcaaatctttacatatgaaaagctcgtttctcttcccagcgtgagggtcttttgaagtttaggggacaggaaaaattcattaaatagtgaccttcatatgagtacccttgtgatggctgtgccaggattataccctttgtgaacacacggatttcatgtgagtttatgcgaatccaagtaataatactgcacgagaagtaaacccacgtataaatcttatgccattggctactgatgtacagcttaatcattaacgcatctacacctacaagcagttgaattaccttagggataacagggtaat

SEQ ID NO: 271 - DNA, 618 bp, synthetic construct
  misc_feature 1..618: note = C02
  source 1..618: mol_type = other DNA
tttttgtgacaataaatagctaatacgcgtcggcatggcagagaagtaggtttaaaaataaagacacttaatcatgtttttaccagtacttatattcacctagtgataggtctgtatgtattggtatttattcttctgcctatcatgtcacactgtagaaacggattagagtgaacttaggatgtgtcagtcatatatcttattaggttccttaggcgtatcaagtcaattggggaccattttcatttagtggtattagcgatctcattaaataaagactggccccgttggtcacatccaacttataaatcttgtcaactgaatacaatgtgacgccgtgcgtgttcgacatgcctaaccacaggagatttcgcgaattaaatgtagaatacccgtataagagcttacgttctgttcccgtacacttttatcggtcagatcaatacttagcggagtcatagactatacctaatcgatcgcccatactaaagtctcgttaatgttcagcggattgggctcctatagggacaagcattcagaagttataccacttagtcaccggctaagctcgctagggcagacggtcctacctgctatatttagggataacagggtaat

SEQ ID NO: 272 - DNA, 618 bp, synthetic construct
  misc_feature 1..618: note = C03
  source 1..618: mol_type = other DNA
cgaattgccgccaagcaacggttcaaagcatacttaaggcatcagttatttttatagtgtagtcgtttagataaaaccgtcgcctaataggtaaatgtggggaggaaattaaatgtcgagggagggttgcgaatatggataatccctgcttaacgacctaagagtttatttcagggactcaacgaaattccactactgagatacctgtttttaaagcatcgacgtgggatacaaaaccttgtactatcttcttctcttcaggagccgtctaactgaattaatagttaaatgcatcctctacatagatgtgacctggatgcgcattgggtatcagaagtggacctatggtataagtcttttgcacacgttttggctatcataggttgtagaatgcgacagtgagaaattttttccccccgtatgatcaagagcggcggtctaacatcgtcatatctaacatatgttcatctcccattacagaaaaaatctggtgtgaaataatggatctacacctaacgtagcctccggaagtactggggcttgaaaagttttcaccaatacgagccaaatgagaggatgttcaagtcttgggagtccgcatagggataacagggtaat

SEQ ID NO: 273 - DNA, 618 bp, synthetic construct
  misc_feature 1..618: note = C04
  source 1..618: mol_type = other DNA
aattcgcatagcgaattgagtttttgtgagctataaattgcttcatatatattataattgccgccattgctacttcgtgaatattatgagccctacaaagttacgtcggcgagaaaaaagaccaccacaccttattgccactgggtttagagccatcgatagataacgaaggatcaatcttacattacaatagcgtccttatcatcatcttttaagaacatttatatctgaggaacttaggtcttgtcgaaacttgaacttgatgcacgtatacataactccgatttagttcgcgaggttaaatataactaaatgtcacaaactgctttctgaacttctagtcatgggattcgatgttccacttgcgaacactccacaccattcgggatggactcactccagatcaacggtcctttattcacctagcgatctataaaaaggaatcactatagtccaaatttggagatgctggtataagccaaaaacaatcattatgccctgtttcctagctaagtcgtaacctggaaactgtcccgttacttgattttacgtttgtaggccatattaattagttactatctgagtctattggtcatagcttagggataacagggtaat

SEQ ID NO: 274 - DNA, 618 bp, synthetic construct
  misc_feature 1..618: note = C05
  source 1..618: mol_type = other DNA
actgcaaagtctggtcttacggattcaactctaaaaatttactctccatctaacataactaatgtgattctttactgcaagatcgagtcggctgatgaagaatattttggctacattgcctaatgaagcgtctttatagtatcgatagcaggcagaactgagcctcttgagtactaatcagttaatacggattagttcttgaattaacgtatttcactgttatttccggagtagtcgttagtttgtgtgcgtaagcgacccctttaacaatcataagtatgatactaagacactgctcatggggggagcaataaacgagtcctaaaaggacgaagcgatcactaggattattttcaagtcatacgcctatggaaccgatcaaaccagggtatagtaacagaaaacactactacctgacccaaattctatggccataaactcgatgctatgtttagatgtctatcagatataacagggcatgtgatactgccggctaacaaaatttacgcactaccttctgaaacgagcctagcaactatgctaacaattacctaccccgggttgatactcacttgtatgacagcgactccaagctgtagctagggataacagggtaat

SEQ ID NO: 275 - DNA, 618 bp, synthetic construct
  misc_feature 1..618: note = C06
  source 1..618: mol_type = other DNA
tcgtgagggacaagcccatactttttggcttcttcccacttgaagtaaggtggcgttcgaacaattttcagccaactagatggttatcctctataggttttatgcaaatagcggcgatgttaaaggttattcaatctcaatatgagtataaatgatccttcctaacttcttacgtcttgcccagtcgcagattttacacacgctaagtaacctggtattagggtataattcactcctccccacggtgcagatctcaccaactgctcaaatatgacgcaattcaggggcgcaataacaccaatcggcccaattacggacatatgtaagggcggcctctatgtgtatgttccatatcaggtatgtttgacgaagggagggatacgaaaattcattcttaactttaaggatacataatgtttttattagtgataataaattcagcatgtctgtaatacggatgacataactctgtccacaacaagaaagcgtgtgaaataaaaggttaccgtggctattgctttccttagagccatatatggggccgcgggcatgctacgtacgtttgacaatttgagtgatttgctctcctaccgttttgagtagggataacagggtaat

SEQ ID NO: 276 - DNA, 618 bp, synthetic construct
  misc_feature 1..618: note = C07
  source 1..618: mol_type = other DNA
cttcgccattttagcgtctgactcctatggaaagagagtgtattcaatttgataaggggaacaatcaaaaaggctagagtatgatgacggtttaaagcgattcagtgcagcggtgtctcagctatataatggaacaatgtgtcccgctggaacgaactacccaaatgaagttttattccttgacaccgcgataatttatgttatcactagtggcacactaataaagctgcaaacttatccacggatctaagataaatttttaacttacggatcgaccaggtggcagtcagaagctgtaaacagaattaaaattctcgataggatcattgtaataagtcaacttagtaatccatagacgcattccacgcgcctaatttcttgcgtgcttttacggtgtcattttactggattgttagagtccgtgacgaacgacttcgttgttccgtaccaaatcgcattgtgcagcatagtgcctagatctacctattaatgttacaagatatcatctgatgacacgcaaaagacatttgcataaagtgaaagcctctctggtatcggctcagtcgagttactcaccgggtagtcctttagattgtacgctagggataacagggtaat

SEQ ID NO: 277 - DNA, 618 bp, synthetic construct
  misc_feature 1..618: note = C08
  source 1..618: mol_type = other DNA
taaatgtaccaatcaccagcgccatacgtgcaaacgaataaccacctcactgccatataaagcggattaaaaattattatgaatcatgcaacgtttatttgagttattcgcatagccccaggcgcgaactacaatatccgacgttcgctgcgaatgcacttatttatcattccatgctcccaactggacatcgaattaagctataatgcgatttaagatcgactaactacgctttccccctatatgaaacatcgctcatcgctatttagtcggaacgtgatctattctatctttaagcggataagggagggctacctcttaacttgcgaagggtccagctatctcgattggagtaaatatatcaaccgtacaacgccaattcgtaagtttggttaggcaattatttggacataatccacagctctctatttaagcgatgacgagattaacgaataagcggatctacccaatcaccaatgtgaacgatgcagcgacccaaatcatttctatgagccaaacacgttttaattaccctcgaagatgcttgtttttacaaaccccatctattccctttctcctaccaaggtaaatttatatatctagggataacagggtaat

SEQ ID NO: 278 - DNA, 618 bp, synthetic construct
  misc_feature 1..618: note = C09
  source 1..618: mol_type = other DNA
catgacgaattaaacgtgtctaacttatgcaactctttgtagattttaactttaacgttcactaactgtgatcattatggctctgttattgagcagcttgtcaacagaagctctacttccaagtgcagtagtacgatcatcctcataggtcctatcacggttacgttaagaccagccagtatgtgctattctatgattctgtatctaaacgcgaaaaaataagcaattaagtgatatacttcgggtgtttaaaatggataaagactcatttacaccggcacttgttgaccggtctggctagtgttgttggttagcgcaactttggggcgcgtataagctctataccggggggaattatattttataagaggtctactctttttgattatgataaacggcaactttaggactgtagtagagtatgcctcaccgctacgatgccacagtggaaaatgttaagattagcccactcctcttatgggttaacggccgatttttgactacgtatttccggttttttgtagggttacatcgaaagtatagggtctacgacgtttaacgtagtcatataaatgatgacgtgtaaccgattattgtcaatagggataacagggtaat

SEQ ID NO: 279 - DNA, 618 bp, synthetic construct
  misc_feature 1..618: note = C010\
  source 1..618: mol_type = other DNA
gctaatttggacaactaccaaagaggctgatagactggtggtaatccccatttattggtattgccatgacatcccctgctgttccccgtacttctacaatggagactactattcagagcttggcctcgccgccttttatttgctgaggtgagctataacagcatggccggaaatgttcacacttaatacgtatggggtaattagggcttgtgcgtgcaagacgctttacccaagttagaggtttcacatacccatttgtgtcgcagattgaagtaatataggcaaaaccattgattcaaaataaaaacgttacaattcgtagggtggtggcgatagtgggttaccgtggcattcagtctatacatctactgccgttgtctctgtacaggatttctatatgatagaggtagacagtcaggacggtagaaagtggagttttatcaatgtatttctcaggatttcgctatgggaaataactattcgaaaggggtaaatcatgccaggccatcaaacttactgattagtcacatcgttcgtaggaataagcactcctcatgccctagtgcgtttggtgatcgaatacggcagggtatcaacggttagggataacagggtaat

SEQ ID NO: 280 - DNA, 618 bp, synthetic construct
  misc_feature 1..618: note = C011
  source 1..618: mol_type = other DNA
aaatcattgcgtatagttttccagaccatcgattaggataccccgctgcgttctggattttttatatacagacacgataatgggtggcaaattctatttccttagtggacatatcgcacattggtttaaaatgtcgcgccaaggcacccgaacagagcgactatgaagtcgtagaactatttccatgcagaacgtacacttaaagatgaccgacaagccaccgaaggttatcaatctgcaaaggcggccaaaattaagaataagttctaatatagcctttgacgaaaattggtacgtgttggctgagcgtaatcaaaccttttcgtatattgtaccggcgtacctctcattatcttgcccttacaacttcagtgaaattttaattaatttttgaccgtagttaatgccactaggatacgtagcaatatgtaatataatgaagcgttatattctgtaaaataagggacgcttttggttgagcactcctgttgaaagatttaagcggtcgctttaaagcgtgcattaagaaagacagcgcaaaatttttgaagctggatctattaacgagggtcctagtgaatgtcctttcttcttatgacttagggataacagggtaat

SEQ ID NO: 281 - DNA, 618 bp, synthetic construct
  misc_feature 1..618: note = C012
  source 1..618: mol_type = other DNA
gctatcgtgaagtgacagacaacacattacaacagttggtatggctatctactttgttgggagcttaagatgagagtaacagctcatgagcaatttaagaaaccaaagtacgggcgagtttaattggtcattgtgttgtcagaacggatgggtatagaaacctagtacttcgacttatcccatgcatcttcgcgtggggtcattcacgagttttgctatctgcatcaggggtacaaggacgctatcataggctcctggcgatgctcgttatgagagtaacaatagtgctcacagagagcttccctattcttattagaattattcttagcaactcacccttgagtttatgccacatggctggtacacgtttcgatttattatgattaatgtcagaacgcgaacttcatatattgtccagtaattcgagaggtcctcacgtattaggatttcgacatgaagaacatataaatcatgtactgtagctaactcagcgagaatacgctcgtgactctctgcctgcatttataccaattttcgtcacggaagccaaacgtgcggcattgttgcgcaattttatggattaagaacataatagtgatatagggataacagggtaat

SEQ ID NO: 282 - DNA, 618 bp, synthetic construct
  misc_feature 1..618: note = C013
  source 1..618: mol_type = other DNA
taaccttatcgcactaaatttgaagatataccacgctgttgatacttcctacttaaacaaatacgactagtggcatcgcacggagcagtccccaagacaacatatcctacacttatataaatcaccaaatcgtagtccagtgtagtgttttcaatgtgcaatctcgcatgtgtaatgaggagcactagtccaatggcacatactaacttatgctggatgctggttcctaaatcttggcataacggtctggctttggactggagtatcgataataatgagcaacgaaatatttgggctttaaccaacttcacataattgtaccgcgggttatattatcgattagctgtttataaaattatgtaaatatgggcgacaattacgaataaatatagttctcaatcagaatctgattcgaacattactttagacgtaggacatctgcattcatgttaagctgaatttaggtgaaatgcattaccttcgttcgatcctatagacgctatccttaaatattgttaaacaagagaaccgcatatttcagtctgacgttttttaggaagggctagttcctgcactttcccccataaaaatttgtcgagttagggataacagggtaat

SEQ ID NO: 283 - DNA, 618 bp, synthetic construct
  misc_feature 1..618: note = C014
  source 1..618: mol_type = other DNA
tccattaattaaatgtaattttatgcaactaacgaaaaccaaacggggggaggttgattcgcctcgaatttatatgaaaacgtgccataggccagatcttgatctgtacacagctgacttcggatgaatattataagaggctgtttagatataacgagcgcattggcgtacgatcttcactccatcgcgcaaattaatcgtagaatttttttcgatttcattagttgactttatcgtgtgcttgaaaaagtaagcgtgccactatatatagcgtttcatacggtattcagaggaagctgttgctgcttattccaatagcggatacatcattctgagttgtagttgcactctgacctacttagagaaacatggttatacttgcttaacgtttaagtttctcgagaatatcaactcaggcgtatcctctagccgtcgagatttgattactcatgctgatgttaactataatacacatttaatcccatgtcaaactttgcaatacacttttacaaagttaccacatctgagtgagcaatccatgtattcgtcgtttcattaggtctgaggtacatgaggttttccattatgcattatgtaccttagggataacagggtaat

SEQ ID NO: 284 - DNA, 618 bp, synthetic construct
  misc_feature 1..618: note = C015
  source 1..618: mol_type = other DNA
ttctactcgcagtgcaattagaattagtaaaaccgatagcagctgtctacatcatatagtcaacccgccattcttagataaactgggattccccttcttgtcgtacattaacgccaattgtgtcaccctcggccatgaactaggagtcagtctccacaaacttatcccatactaatgtctgaacctgtacctcctctcactactgattagggtcataatccaagtttggtatatgtatagttacggaaatgattaataccctgacgttccatgtcaaccgtggacttggcttggcgaggaaagtataatactagttatcgattagtctggctcggtccgtcacttcaataaggcatcaaagtctgtactctaacacagaaggttatagtttgtaagttactttcgtacggatgattgccctctataaccatatgcggatgactgaggtatagggtgtaatgtacaaacataatgtggtatgtttgaaaacctacactggatgagtcttggttaggatgtgcgatcatacagagaagtacaagtgagccttagattggtccatgaacaacagcgtagaggtagctataaaccttggagagttagggataacagggtaat

SEQ ID NO: 285 - DNA, 618 bp, synthetic construct
  misc_feature 1..618: note = C016
  source 1..618: mol_type = other DNA
tgttgccactcatatagtttcgtatctgataatgagttgttggcatgctgtgagagccaatacaacgaggcttgactggaaggtagtcatacaccaggttcagctagattaacgattttattcactcaagcatttggtctactgtacgacggtgcggataactttgatttacgtctgtgaaatgaattattcgagaaatgcgttcaggtactcatgcccttcgcaaccgcgagtacggtgcacggggagtgtacggatatgaaacatctcagtatatccatacgggtaatattaacgcagaatcgatcttaagcaagatacaaaccaacggatcagaaatatattatcttatgttgccagagaatagtcacgatatatcgggaagtctctaaaaatcaaattggcggtgttaggtatatgagcagacatagtcgttcgagagggccgatggatattatgcaacgttcacaaacttagacaggtttgtctcttattcaacagacaatttgcgattcaacacgatgctcaggcagacaataattacaatagctagttatttggtctgacctttaaggaaggctgtaaaattagcttacgagatagggataacagggtaat

SEQ ID NO: 286 - DNA, 618 bp, synthetic construct
  misc_feature 1..618: note = C017
  source 1..618: mol_type = other DNA
tgtactatcatggggcatcaactttccaacagaaatcaacattccataggtatttagtactcgtcattcgcatgcaatgagttactcgtaggtaggggcttacttgccgatgatccgtatacgtgctcagaatgattcagcaccgccgagagttatttatggcacgtgcactagtgatctttaacctttaattgcgtttcctttggatgacctatcgcgttccactttgcaagattatatttattattggactatttattaatgatctcaaacttgctgatatgcgcaacttatcagcttagaatctagccagtcccttgccagagttgtcgaatcctggacttgtctacgcgatgattcttacattgatttagggattggctacattaactggggtacttaatacgaattatgtctgttgagtttctcagaataatgtaactgcatgcaaaaatcacctttcatatcttggctgatgtcatgttgaatacgcgtcagatgaacaagccatcagggagcacgtgccccagtccagcactggtattttttgcctcgaacaatgtattagcaaagaatatttcagtttatccggctgtgcaatagggataacagggtaat

SEQ ID NO: 287 - DNA, 618 bp, synthetic construct
  misc_feature 1..618: note = C018
  source 1..618: mol_type = other DNA
ttttcctagattcgcattgaaagagaggtgataattttgccaactgcgcgatttggctgctataaataaaatattcagatgttaatctaggatggttggtgataaacgcggatatagtgtaatctccccaactcttatgctagcgggtatactcttttgtaagaatattgaattgtaaactcgtagataaatgggttcgaggccctgatggaggtcgcatagtatcgattcttatgacatatatcccctagacgtacaaacgagtacctagttctagttgagtagggtccagaaggatattatgcttccttcaaatctgaacacaaataatttacgagtaccaatcttatcagttaagacttattccaaaccggtatgcaggggagattcctttttgtataaaagaacttatgtatgccgctcttaccagcacgccgacaccattaatctataattttgtaattacttatagagaagtagcatatacaatctacgtataggaagatggtgttttgcagtatggcaatttctaagtttattatgatgaacaacaagagtaaattggcgacagtgatttaaatgtagaaatagacgcattgttagggataacagggtaat

SEQ ID NO: 288 - DNA, 618 bp, synthetic construct
  misc_feature 1..618: note = C019
  source 1..618: mol_type = other DNA
taagaatttcacggaacgtttatttgcttcgcactactacaagccattataagtactggcagtcgttgttcctatatctagtattattatatcggtaatgcaaccatatctgagttcgctacccccaccgagatacaaagttgcatagttaaactcgccgattaaatcaaagactgtaggaagatggccgttattctttaatggggtcaacaagcggagaaacgatccttcgaacattctgatttgcatatttagaaatatgctatcttgtacagaatcccttgctaatgatagtgatgattgcagcgatggaggggtaaaacatgtgtcagaatccaaataactatggtactgggatttgacgtatctacaatttcttcagttaatgttagtttcatgtatcatttaccaaactagaatactagcactagtatattctactgaacaacttcataccatggtcctactatactactctagtgactaaattgtagaactgtatatgactgatcgccaaaggaatacgtccacgtcagcggcaatcgatgtgcgtggacagtttctgcatttaattttactagtcgctagtgctgtgggtggtagggataacagggtaat

SEQ ID NO: 289 - DNA, 618 bp, synthetic construct
  misc_feature 1..618: note = C020
  source 1..618: mol_type = other DNA
tcataatgcaccgatcatattaatccttagtaaaattagaatagaaacaggaacaactgggcaactagcccggacttctaatggccagggcaaaggttggaacgaacgcgcgacccctcgtacgctaccgtcatggtatggtaaaatgacctcgaccttcgcaccattatgatcaccgacgtttcaaatgacttgtgaccaggtctaggtctttcgcgcgactgagtgtcttgatattcattgttctagtcaaggcctgtcaaccagacagtacggtacaccgtagttgatctgcgacccgggataatctcctctatacgtcgttttcctgcgatgtctttgtattatatacgtacctggtgtaagtgctatatatccccattgcgtgttattgttttaacggctccagaaaatagtgactttgatataacgtttgatgggacattttttccacccaatggtatcacctagaattaccatacagtttcgaatagctgaataccagtatcttatcactgtcaaaagagcgtcactgaaaagattaatctactttctcagtagaatatttcgccattgatgcctgaccgaattaaatatatatagggataacagggtaat

SEQ ID NO: 290 - DNA, 618 bp, synthetic construct
  misc_feature 1..618: note = C021
  source 1..618: mol_type = other DNA
tacctaattgttatagaaatcttaaaaggttcgggtgaagtcgtattaatacttaggactatatggggctcgagtaagagcgttaggttcttcatccgcacctaaatgaatattgagtgcacagagcgcgatagcacggatgtatcttccattgcttgtataacaagcaagtagggtcaagccagctgcattacattaaaagttcggtataaaagggcgtactctgttttatttacatcccactcgcacatttacatctcgccatattcacgatacaaatttttttactattagtcagagtgacctggttgaaatttatgtcgatccttgaactagctgcaccagatcattagtcacatatcggcgccgaagctctgtatgttcgctccacgaccatgtgctcgacctagggtcatccagacaaaatagtaaaacgattaacctaatcgtgttctcccacgacattcacataatggtacacaagactttctgggatttaagacatgacgcttattaacatcgccacgtgatgttctagcactcataccagctgagttagtttatattaacagtcatgtctcagctggggaccctctcaactagggataacagggtaat

SEQ ID NO: 291 - DNA, 1453 bp, synthetic construct
  misc_feature 1..1453: note = FG1-1
  source 1..1453: mol_type = other DNA
gcccggctgtgggcaccccctcgccctggcggcgccttcgtttctcggcgcttcccgctccccggtccccgttcgtcggcctaggcgccaaagcgcaccaccgatgtcccccggcggcacgcgaagccagtggggcaccgcggggctgggcctcgagcgcgcgcgcctgttatggtatttgaacaagttaatacgcaactgtaagcgaacctttatctcttataattcagctccatccacctcagaacaagtcccgcaatgcgtctttgagacgtacatcctgatcagattcgagttacacgagatctatcaaaacagactcatcagtcatcaaaaacacgcggtcctgttacgcgtttacgttataaggactagatcccgtgtacttacactaggcaggaacagaagatgctacttatactccggtaagtacccgctatagtatcgaaagttgtccttagtaagacaacccaacttttgaaagtggatgttagcaggccataccgcatatttttgccggctactctgtttccacagactaaccgggcccgccagcagtgtgaaggaaagaggtaggcacgcactgtgcccgatcgcagtgcttacggaatgatcacggacataacagtagcgtgagtttgtagtggttaatgccgtcagaaaaaattaaataatctggcgtagcggatgtgacaaattaggaagtgcctggaaagccggggagatttaataaggtctagagcggctctatagagacgtcagcaacagtcatgccctactgtgctgcgacccagtgtcgtcttacgaaccgccacttaacgctggaatcgcgaccgacgcattcaaagctatgcgatacccatctcctaaaattttgagtagtgatgttcattattctggcttaaagattaaaggcacgtggacgtacgtatattatggggaaatgaaacaaaagctcggcgaattgatacaaatgattaatggtccggtcatatttagtgaactgtttgttagaagacaaagaaaggagtagggtacaagtagctacaagggcggagaaaaaaccttacaatatcacatgttacacctagcaaccaaaagggcttttgttcacggtttggagtcaaacttgtaataaaactttccgtgtgaatccgaatggaactcggatcgaaagataaaataatgtggatttacagggcggagataattttgtttgtttttgttttgcgggcatcaactggcattcgacctacgagcatcctttagttatatatctctccatcctgttaaaagaaatcgcacgatagaaaatcctaagctaaactagtgctaattactactttagcctcgctttaaactgcgagttatgtcgtgttttatacctttggagcccgcgattccgagatcatttggactgcttgtgcaatggttctaattttgtgctgcgtat

SEQ ID NO: 292 - DNA, 897 bp, synthetic construct
  misc_feature 1..897: note = FG1-2
  source 1..897: mol_type = other DNA
agcttgtccctccggcggctctcccgttggcctcatgtggccgccaacgcctcccgtaccgcgacgcttaccggtccccttcgggctcaacgggtcatagaaaagagtgcacaaaacgatgacacaccacgtgtttattggctggtatggcacatgcggagcttactgcgggtgctaagtaaagtcccgacattatggtataccgagattaacttcttactcagtgagttattcatctccgaagcacagctgcctttctggcgatagtgggacggatcccccatggagcagagcaggataaggctgtcaaaagtgttcccgtagtcgtcagtcaatattatcaagagaaaccgacataacccaaatagagctgcttaaaaaattctgctagagtcccgaggagatatacgtttataagggtaaataagaagtattaagaagagttcctcccactacttttcctccagagataaaactgactgcaaagggttgcgtcgggtgtcttgagctagcccggcctgcgtatgcaatccctgcaccgctcacaccctttcataacgaaccatcagcgctagagcaatgacacggtgcctaagagtggtctagatacgtaggaagaaggaagataactgttcagtacacggcgtataaggtcgtcattaccatgctgttttgtgataactaaaaaaaactaaggtaaatgcgagcccgattgcatcgaacttgtcgatgaacactcgaacgcagttgaaacttactaagcaaatctgaaagatggaaatgcgttaagaaaccacagatgaagagatagcacaaatagttacattaatgttcggatcatgctgttattagtttacgccggtctgagtcttccggcgtgctctcaaacagatgccg

SEQ ID NO: 293 - DNA, 506 bp, synthetic construct
  misc_feature 1..506: note = FG2-1
  source 1..506: mol_type = other DNA
ctagcgattatcggttgcgatccaccgacccgtaagcggggggttcgacgcggtccccggccaatgccgtgcaccgcccatgtattcgtggagcgctgttggatgccggggggtcaatgggcccagcgctacccgtagtgttgtggtccgcaggcaccaacttcacgtaagaacccttaattgtcctttggcccgtcccaggccagcgcagcgccgtgactttcaatgtgtggacccgttttcacccgggtaccgtttcccagacgccccgcaattacggcgtccatatcggatgggtctatctagtgtgttccgcgccgagcacggggcggcaagtccggaccgtcgcggatgacgcgattgtgggcaactacggctagcgtgaggtggacctaagtgacccgcgcgcaaagaagggttaggctaagtcaactccgcgctccccgcactcgttattggcagcgcgtcttcaattacgggccgggggagtaattgtatatgcatac

SEQ ID NO: 294 - DNA, 886 bp, synthetic construct
  misc_feature 1..886: note = FG2-2
  source 1..886: mol_type = other DNA
acgtaagggctatagacttcgacgattcggacagctccgtgtgtgagcaaggtagaatagagagggtatagtgtaaaaaggctaaatgtggagctagagactcgaaaggggccggttaatgtggcaatcagtggcagttaatagcccacggaaaggtcgctaaccgggttcggtaacgattccgagacgcccggggtgcgcggagcagcgtccgtccgtggacccatccgcgcattcgaggattacaggtccggcgcctaaatggtgcgaagtcccgctctttgcgtaatgagccaatgtccatcactatctttcgggcacactctacgttgcaatagggatatcatatcgaggaggggagaggattatcgataaaggattagcggtagcctctctgtttttatcccgttcgaatccattcattttggcgtattatctacagcgtattcggtcactccccccttagcgtagaacgtgtgccccaactgtaacccttaacgatatcataactcgacgtggtagggcgctcgcgctaacagcctacagttgctacgtggggatataccaatcgtcccgagtgtccttgagtgttatcctggggctgtcgatttctactggctgaataattgaggagactccccatacctgaatgtatcaagaactagattttgtctcaagtccttcacagcttaatttcccgaaagaatcttctacaacttattgtgtgtacaaatgcgctgcttttatgcgtacaagtactctgtgaacatatgacgttttaaaatcttttacgacggctgccctttgcttataatatgtaagtctagacgctctgatcataaatgcactatggttctgagtttgccgacggtgcgaataacagcct

SEQ ID NO: 295 - DNA, 2530 bp, synthetic construct
  misc_feature 1..2530: note = FG3-1
  source 1..2530: mol_type = other DNA
tgcgagtttaggtgcgtgactaagtttcctatacgtgtccgattgacattctattttatttattagactggtgatatagtcgacagtagtagattgagtggacgaataaactaccaaactaaaaatcgctaacccagccatgaaagagctagacagaactgcccgcgttgtacctgcgctctcctctccgcgattattcatccatgttgcaccatggaacgatgcgcatctaaacgatggcttataaatgtagtagtcaccacagaaatatgtcgtgatctcgtcccaaaaacgtcatggcctttgatcgcaacagccgagtctatcagtaactttatatcggtataggggctacggagatacggcttagcacgtcctacacctcctagagtttgtctcgaaatcctaagcgtagtcatagataatgagaatttggaataagcacccaagcctaactatatagaactggtagtaacggatgtacacgtaggacgagttaaaaatgtaatctgattaaatttggtcggtgctaagacggaaaaatctctatatcaagcgcatcgaagctccgggtaccagtaagtgagtagaaacagccaggtaaacatatagaacgtaatgagcaggcctatagttctacctctttgagactaatgaagagcaagaaaattagatatcatgagtgttcattgatttttactgggtaatattgttaacatatagcacatagtttcttccaatcgaggcacagccttcctctgtctttatagagaactatcataggcttcgaagaagtaaattcgaattaatgtgaccggttgattgttcgcattacttatgtgggaggtaaggagcttacagattagcaattaactaccgcctgacagtatgctagtatataagtgaataagtgactgcataagaagagatataaaaaagggttcgccctcatagactatgaagctcgcattaatgtcatccgaaaaaacggattgtccgaaatactatattcctgcatcaaaataagatacgggagtatacagtgtcatgtccgcattaactggaactcctaatgtaataatgaaagtacagtgatatttaagtttagtgatgatccttagtggaacataccatataatatgacatcttaaatcgttatcctccactagcgcactacctatttgagtacaaaattaaatgtaaacggtgttgtgtcttaccactaccagcataagggccccaaatcgatgtaaggtgatccacggcaaatttcacccgctcgcattgaggaaaattctcgagaaggcagctatagaaaggccgtactaattgtatgatgggctgaaggtacggagacggcgtatggttttgaaatctgaggaactagatatagtgggacggttggcacatatatggatgtggtcccattattcaatgtaagattgatgcgtcctgtttcaaaagaaatagaaacacagacggggaaaggagtcaaaaggaaaacaaccgattgtgatgtattaggcctttcggtccataaaaatactatcgcaattaataggactgatctagaagctgaacaaggataataaattcagaaactatgtaaacgacaatcatttgaatagaataaccactatgaaacttgggcaaaagacgaaaccgaaagagggaagtagatttaagggcctggacggttctctggcgcggccaattatcgcaccccagactagagaggcatcgtcatcatactctaccaattcctcgtcctggctccactcgaccagatcagaggcctcggttcacatccgctcgggatggcggcgccacttgcatctcgacgtaacctgaaatcctcaggatccgggacttggcgggttgaccaaggggctcgatgattgagacagggtactgcaccacgaccagccaaccctcacgaactgtccatgctgcgtatgaacgctagcgaaacaccaaaccagctcgtcatggctcaacgattgaagtagaggagtgcaattcgagtcgtggcgatgcccaatctcaattatgctggcggaggggacactcacgtcccgaggaagagccatccgcggcaaagcgccgaccagctccacaaccgaagccgcgacgacgtgccagtaaatagcacgtcgaggagcacgcagcatggggaaggccagggtgagctcagcgtccgccgcaatggcttcggtgaggtagacccgacacaccatccaccattggcctaagccgatggggaccttcgacgtagcgatcgcgccgtacctggagctcgctctctggcaggagacgtgccgaggggtaactggcgctgagcgaacccctcaatcatagcaagtgtcccagttttttgatgttgagctttttggagtagttgggggatggagggaatatgtatagttataatgttttgatgatggaactgtatggagatgtagtgaatgcaccgccgtgaagatccggctcgagaagcccctttcgacgggtcttactgacgcgcgggtgt

SEQ ID NO: 296 - DNA, 1556 bp, synthetic construct
  misc_feature 1..1556: note = FG3-2
  source 1..1556: mol_type = other DNA
aagtctacgaccgggcccggtccgtcccagggctgcggcttgcccgctgcccccgggtcgcctgggccccctggtctcccggcaccgcgccttcggccggtcccgccctgccccggcgcccccccattgccgttgtcgcccctctgcgcatcataaagatatcgtttgaccgaattgagatatgttgggtgctcgctaaatttgcgtcgagttcccttttcctgtgagttccgccaacttagtgttgtgtgctttttcgactataacctgctgagatgcggtataagagcgggtataagggacgtttgctttccggtccttcgaactttaggacacattcgcacgatatgtacaccacggcacaagaataggtggtcgatctatccttgtgcgtcagtgacccttcatcccttgatgtcgcgcagacccgcccagggtcctctgaaccaacctgttcatcactcctttgctacggcggaaaaaggtttggtgtgcgcttgtcgacctcggttgaagcactaagcggtatacgcactacgtctaactaaaatccgtcacggccacgaagattggcgccgactcgacctatctcgtccgccggtccccacgcctgtgtccatcgggacaagttgggatacggcgtccttgagcatcgttaaataatcgcagtacgtagctgattagggaaaagtacgttaacctaccaggggagcgggatgtagatccgtagaatgccgtcccaagcagcaacagcggcgacggtatcccgaccacgcggccaccgcagggacgtgatctccttcacgctttgtctgctgacctgatgctcattataggggaagggcgatatcctatatcatatggtaaggggaactaccggtggtagtagtgatagagtgcgacatcagttcctttatataaagtcgagaatgaagagcctcctgtctacccgttcaccccttttgccgagaccgtcctactaagtgttaccattgccaaccgggttcgaggtaggatgccgaaacgtcactccgaccataacgtctgatagagacaagaggatatcaagaatatgccggctagtgtatgccagacttggctatgccatgcaaatatactaacacggataccagggtttgagctatcttacgaaatggtgtatcccgaacatgtggggcgtggacgccatgcgctgaaaatttacaatagtcaaggtgcatagagtaatatgagctcgtacaatacagtaggagttgaaaatcaagtcattatacataaagtatcagaagataatcaggcctaaataatcgcccttgtcgaaattacatgattatcttcctaaactcaggttacaaggttgtgggtccgtaggcctgtaggtaaatccatgacgtcgatgaggcccatataaatcaaggattatcgcactgttgaacggttaacgtgtaatgctagctttccgatatcaaggcctaaataccgcgatttagtacagtgccgaaatagataacaagctccggtggtttcaaaaagtggtgatctcgatgtcagccgca

SEQ ID NO: 297 - DNA, 1357 bp, synthetic construct
  misc_feature 1..1357: note = FG4-1
  source 1..1357: mol_type = other DNA
cccctggtagaacatctgctattccttgttaaatccgactatttaggcctaacgggaatgatggtctctactcccttgtagagggtagggtccttttataggtgagtacagcatgattttgagcgaatcaaatatatgattacgaacctaccaaccttgagggccccaaagaaggtacttatccttgctatacaggcagttctcacgcatcagtctcacggtgctaaacaccaagtgccatcaggagttatggccatgatatgcggcgagaagaaaaagagtaagtccgcagagcgtagaaacataggggaaggcagccaaagacgtccattaaagggtggcgaaccgcagagatgagggcggcgacgccgccgccactagaccgcaggaagaggacggcaacatcacgtgaggggtgaaggggataaatgccggcaggctggacaggtcgcaaagacgagagaaacgggtccgtggtccaaaccaaaacacatccacgacccaggagggataggctgtgcgaggggggctagctcccaggtcttcaaccgtacgacgaagacaggaactggcgttctaacgccggggagaggaaaactccctggaaaggccccgaacgattaacagtagttcgacgtacaacaagaccgtaaagagcagatacgcaacaatgaaataggacaaaggaaacgaagagaattacgaaatagaaaaacggacgcaaaactgagggatgaaaaccgacggatacctctgactgccgctcggcgtaccgttagaatgagggagagaaaaagaaagacagaaagcggaatgtcatgctacgtcaaaggaggtacggggaagcaaatcgaagagtggactcggttagaacctagtaccctcgcccacgcatccgagtagcgtgatcccgcagtggatagatcggtaaggccagcgtgaagggagatctcagatgcgacgaaacgatagcatgcttaaacctgtatgcaaggcaatcaatcggcccccacgctgaggcggaacgtcacaaaaatcccacagaatccccgcacccccccctacgtcccccaccgcccccgaacgcacgcccagcctcctcaagacccccttcgtactcgctccctggacggacttccggcactggtgatcctagttctggacgcggacggaggataggcaacagacgaactgtggcgccagggtaagtgtaccgacgcaaagcgcccccccttactcaccggggcgcctattatctaaccaacgtcgatcggggcaatggccgagaggcggaacagtgtgagggtcagccagaacgggaacccggggtgccctcccatcctatggggaggagaga

SEQ ID NO: 298 - DNA, 1501 bp, synthetic construct
  misc_feature 1..1501: note = FG4-2
  source 1..1501: mol_type = other DNA
agccatcgcgcccgcacgctgcggcgtgctcggcccacaccagccaccccgcggtgccaaaccgcaacccgttcgccacaaacgagcacgcgcccgcacaaccagaagagcagtgcgtcgccaacgggcccaagaaaaaccaacccggctcaagcaagaccgcgacatttggatgccccgagtctttatgaaacgttctggcagcacatgcataaattatttgccggcagcaggtaatacttagtatcgccgcgaagctcaggtgcgcacgcagaatctgctgcggcgaagctcacgggacccagaaaaaggagccgttgaacgaggggatcacgatcctacccccggactcggtcttcagatcacccggtgttctggacggggaacgcaaacactggcatgagttgcctgaagacccggacctgcgcctcagtctggtgtacagactgaaacaaaagaaattgagtagcttcatctgccataaaaaacagcatgctgcgatgttaaacgatgaaatgttacaaggtgagaaaatgaagaaggtgactcacggatatttacgaaaattaccccacaactataatcgtcgaatgaacgcgtggggcaacggggcccccggcgaggtgaacgagatgagccgggagcccagtggccgcgcacaaggaggctggtagacactgtccaggggatacggctacgccgggagaaagggtcttcacacgagagcgaagaccccagggaagggtgaccgagcatgtgaaaaggtaggtgaagaccgcaggggtgcacggtataccgtagggggaaatagagcaagaaaggattaaaatgggggaaaggaacgcccaagaaggggggcacggagaaaaatgggaggagcagaagtgaaagagaaagagaagatggtgaatccacacacgggatctaaagccggtgttgagaagaaaaacataccctatagagacggatgtttaccgcttgtccataaaacgctttcattactaatgaacggaggaagtgctcattagtaataggagaagatcaaaagtggtacgttcacgcccaaactactcccgaaagagtgaaataggacgtgggatcaatgccatattcagtgcagcaggagacacaaatacacgacagaatcggacacctcgcgagatgaccgttggccctgagtatttctacgtctaacgagggtgaagaacgtcgtgtgagtattgtcacagtaaagcagccacgaaccatcgaccccataagatgggggaatatagggtatcaccccatcagcgtatctagtgggatacactaactaaaacagttggcccctctccaaaagtacaacgcggcttaacctaggcttgatgaggctacaacgaggcagtcagccgcaaggaactctgtacgcgtatcaaagaagtgactcacctatcagaccctaggggactggaataatcaatcgtcgaaaccaccacgagcagagagtggtcatgaaggtacg

SEQ ID NO: 299 - DNA, 1558 bp, synthetic construct
  misc_feature 1..1558: note = FG5-1
  source 1..1558: mol_type = other DNA
gtggcctacggggaaccagtagggacggccacgcgggaaaaggcgatcagacccacctggcctagagacagaccaggctataaccaggaactccggtggaggctcggcgcagctttggtccacgcgtatctgaaaagcttacacgaccggctttgaaaccaccgcaatcaaaaagggagaatgtcaaaccctccgcaacaggtgaaaaactagcagagtttaaacattgtgtcgagactaaaaacagcccagaaagcaaaaggaacgaccctccagcacggaaaaacaacgaaggaataaaccccaagattggaaattcaacttcgcgaaaaagtgctccacaccagaaaattcgggcaaagaaagacctactcacaagagaaggtcctatagttacggtgctggttgttaatggaattaatagccagatagaacacagagaggaaatcggttaacaaatgcaacgtaaacctaaagttgactcctacacatagcgaaatgcctgtaggtgaaagtaaaggatgaaatatcctaatccatacatacagcgaaagcgtgattgttgaacgaagaagggaaacaggccccggctctttgaatccaggagtaaccaggcttcaagcatggcaatcttgacgttcactcaagcatgtctggccttgtaccccaaaaggaatacactcaaggtggggaaatattgagaagatagacaatatccatgaggctcagccagggatacacactccaacacggcggtgatcgaagaggtagaaaaaaaagggtaatggaatatcaacagcgacgctgctcttgggattcccgcgatcgcgcgaggcacccctaaaaggatcagtcgacatgtctccacgctgagcagaaaggtgaaaaaaagagcacaacgaaatggataggaggattgtaaggggatcaggaacttatcacagactcatcgaaatagtagcaaccacccagatgtctcccaccctaccaggagggcttctcaaaaactaatcagttggaaatcccgccctgccagtaaggtcttcgaggtagggaatatggtaaagggcggtatttcgagtccccaatagaaacgcgagccgaggttggggacggtctccctgacgacgcgaactcattcgccccggcagctgggattcttttcttctgtaccaacgacagcgcccccagcccgcacctgcccaacgtacaaaatgcgccagtggtctggagccgcgatcccggagcggcgaagaaacgcctgaatgcggccgcgcgtacccgccgggcgatgtccgatacgattagtctgatttgatcgcggaatgcaaacgtaaccggaactgttgcagtccttatattctgatcaatgaacctgtactagttgaggcacggattgccgcgatgtgtattcagaggtaagggaggggacgtcacgatcaaaaacgaggcggtcagtgggccttttgttcacatattcgaatgaatccaatgcgagttgaggaacgaacaatttaataattcctttgttgagccctatatgtcctccccccttcct

SEQ ID NO: 300 - DNA, 1947 bp, synthetic construct
  misc_feature 1..1947: note = FG5-2
  source 1..1947: mol_type = other DNA
ccatcggcggtgccctacgggcgcatccctcggccgctccacgcccgcctggaccgcggacggagctcccgcagaccgataccccggcgaggaccttatccatacctcgtaacaatatgtggctccaatccccggtaatgtcgctcagattgcaatgacgtcgatgcgggttgccgagccctcaatgggtcggtcatgagcggttccgggggggataggtgaaacggcgaacacgcttagtaagattgaggcgtttaaacgcggggccgccgattactcacggacatggggggtacgaggacctacgcgaagggcctccaggagcgatttgacaagggaagtgcccaacggttggctcgtaccacggaccagggagtcccgctaggtcgttatcgcttgcaaaggaaaaattagtgaatggataaaagggcggtggtgaccatcccaatccaggaactagtccagataacaagtggatcccaacagtgagaaaccagggtttcccgaccccattctaataaccagcggtgggctgccgtgaggtatcgcaagcatattcccgttcttcaagcccgatttagaaaaccatatatgaaaggtcaaagtacggaaccccgctgaaagcaaagaagcgcataacttgcgcacttttgagttatgaataaactgtcgctgtcaggagtaaacgatgtaaatgcaaccaaattagcacacaaagaagacacggtcgagatccgcctgtacaggtgggggcgattcgcctctttgcactttgataattacctcgggaggtcggcccactccaggacccactttcgcctaagtgcaaaaggcggtaggctggtgagtgacaccaattgcgtaataagagcgactggagaggcacggagatcaacggtaaagaatcataaattgaggacgacgggaacaagaacaacggaagaatagaataatggagtacgaggaagttctaactcaatcgttcaagacaggaagatgagattaacgggtctgcagcaaacaataaatggccacaaaataggtgcaaaactccgttacgcgaaccgtctacttatcgttatcctgcgaggtattttgggccgtaacataccgtactttcagctttctagagttactacattaagagattaggtgtcgtccatgtcttagccacagttctaccaacgatcccccccccccggatcgcccaaaacgcactactggcgtgaacaataaacggatgcgcctgcctcgtactggcatttaaatagtcgacctcagtgccgaaaagagcgtagagacaacacacacaaaggaagaaaataggaagttatagaatacacctaaagaaaggaggcaggaatagaatgcaaagggtgcataaccacctaaccttcatagctgtgaaatagcattgaccaggcacgaccagaacaatctaaaccggaaaaaggttaagatcaacagacggacaacacgacaattggcacacgtgagtatcacatccaggtctcgactgtctccctgacagccttcataacgcagccccaaaaagcaaaaagcggataatcagtaatcgcgagtgaacaaatcgcaaaccccatgcgagggggcaagcttagaatatgagacgaagagtaaccgaacatacgcacaaaaaagtctaacaaaataaacggtggaactatagtgtataaatctgttaaatacgcgcttctttgaagggtatcgtggtgtggataaggcgcacaaaataatgctgtcgattcgagttggaaaataggtgttatatctgtatttaggtgatatcgctttaaatattacccgttccatgtttttaaattgtcatcgtagtctagaagatatgtaatggttaaaactgtacttgatcgtttttatttattgcactgctaagaacaggatatttggtgacattatatagtatgt

SEQ ID NO: 301 - DNA, 1489 bp, synthetic construct
  misc_feature 1..1489: note = FG6-1
  source 1..1489: mol_type = other DNA
ccggcgcacgccagggtcgccccgcgcctccgccgccgggcgcacaagccgcgtctccctccctgggggtggcggccgcccgccggcccggcgcgcctagggcgcggcggtccatgaacggctcgctaccaggcaggcacttaggcagcctgatgttgtagcgttaagaatggccgagcggaagcggttaacagcctccagccgcgaaccaaaccccaagggatgagaacggccaattacccaaatgtacacaacactcccacccccgtgctcccaccaccggccctctaggaccgggcgacaacgagttagcaccgttgtctccgccccacggctttgcccagcacacctcgcgcctctacactgaccgactaggcctgaccacctgtcagcctgctcctaagaccgcacgaatagcccgtagtttccccgccgcgtcaggacgagccggccactgggggcataatcatcaggccgtagacgagctttcgtggcccctcggccggtccgggtgcaacggccccggtccctggccgactggacaaccaatcccctggtgtgatcggcaccgaacttgcgccagccacgtgccctcaagagcacgggactgccctgcaccgacccgcatccctcaccccgtagacgccgcactccaacctgtagcgggaaaaattggcagagtactgtgcctaatgaatgctaggtgaggcaagagagggttcggagctaaaacgttcggggctacgctgacctaccgtatgttcccaccgtctgaacgtgtttgcgtttagataccagtacgaaagtttggatcaattgggagaatttagtggtgtagttaagtgagcattttctatagaccgacttgatcccttagaaaatatggtaagactatgggggatcagtgatatctacgtagcagagttctagtatgagacgccgagcaagggcgagctctgggtcttggcaaagctgattcacgataaagcgatagacgaagtaatcgtatcaacgatgctacattacactacttcacgatcgccggtcaacatgtagaaagggtcggtattgacagtcgtcgtctacggttatagaagtttccatttattatatgggactatatatatgtaagattctagcagcgagtagatttaacttaaagttcatgttaaaaaccaggtaagtaatcgtcttaatttactatatttcatattaggtaattcaatacttccgtaaagctattcttgtgtaacttcaaacaagaaactatgcaaatacacgtaaacatagaaggagccgatcatctgtttattccaaagctgtggttctgctaagtagaaatagcttccacactagtccttctgccgattacccctaccggcgtagatggatttatttaatctttacgatatcgtttgaaagtttttcttttagtaaagattaggtaaattaagcgaatgatagtaatattcatatataagtagttaca

SEQ ID NO: 302 - DNA, 2145 bp, synthetic construct
  misc_feature 1..2145: note = FG6-2
  source 1..2145: mol_type = other DNA
acggtctgctgccgcccccgggctaggcccggggagggagtgcgggtgggaaccctccttggcggggaggggcgcgtagcccaggtgctcagacctggccgtcactatcgtgctccatggtcccagcgccttagtaacgcgtagggacatatgcaggctcttccgggcagcgccctgcgtccgcgccgtcccccctgggtccagccgcggccccgcccacccccgcccagtgacgtccgcacgcaccgggcgagcaaggccagcagcggcccgcggcacccccagtggcgagcctgacccgctgcctgggggaaggctgaacgtgggccggccctcggccgggtcgacagctcctcgcacttagggctggaaactgtgtcgcaagctgttccctgcactgactggccgcggtggggttctcgcccggggcgtttgccgtcaaggtgttcccgggtggggggaggcgccaccggagtactggggggtctcgtgtgcgccggcaacaccccctcgaccccgcgtttggttcgtgcccgccctggtctggcggagacggaggtcctctcgccgggggggagggacgcccgcccagagagctgctgtgtagggaggtaccggaattggcgagtaacttgctgaagcgtccgccggtatccgtcgctagtgtgtaaaatatgttgacatcccgcagtatgcgatatcaactaagtcgcatcgagttgccccttaggccgcaccttacttttaagaaaagtacgatgtgattcttccactcatctgcaacgccacagcgtcctacatcacgatgggaaggtttttcattagcgttttagtgggatataggctaacatcgcaacgatgattaaggagaaagagcagcaacgcccaggcaaagaaaaagggacgacaaaaccactcaagcaccgagcggaacagcctaatcgcggactggcgcgtatcgtaactccggcctaacatattcgaagcatgagcaggcacccccgcagcttcgaccgttatcgtgatactgtgagccctctggcacaggtaccagcagaagcagggtggaaagagcgaagaagaagctaccgcgagaagaagatgaaaataagaccgtcaggctttgcagcgcaggcgccccggccctagacacttcgccatagggatccgaacgctgaaacaaaggaccgagcactccacccacgccgactcccacaatcacacgtagatgtccgcaatgacccacgcgtcctccagtcgtccgctagtgcagcccctcggagttcccgcactccgttcggacccgcgcgggctactgggccgtccccgcggcggctccgtgcgataatcctcccaggcccgttccccgccgcacgctgctccccctcgcatccaccccgcgcctcaagtcgaaatccgctcccggactgacgcccccgccccccctggttccacgtattatcacgcacgactccccctccccgccccactctaacggccctcgccgcctgatcgtcaggcgggatgcacgcgacgcccccacacgttccgaccctaggctgatacccgtcttcatcgctatcgtcgccgcccgagatagcccaacccacctccctccgcgccagatgggcccaggagagaatagggtgcaccgatcgcgggcccgaatcagcgttccaggtcaagagcactccgccctacgggcactaccccattccttcccaccccctcgttactagtccgacgcagacgttcactggcgcccagaggtaggggagccaataaacggaagaacgtggccgagggacgtgccagctacgggcatgagcgcaaggaccctcgggcagggctctcacgctccccaaccttctctccgtaaagtccgccaagcgctggccaaagaactacccagcacagccacccccccatgcgtaagcccccgagttaacggtggagtcgcttccctcgtcccgccgccgttaccctgtatgattcaccccgtggcctagtgcaacgtaccacgcggcccgccctcgccgccccgaagccccgggcggccggtcgtcagcatgagtgcccatagaccgccacgcgcgtaaacaccggccgagccgccgctggcttttgcgtgtcgacgaacaattg

SEQ ID NO: 303 - DNA, 1173 bp, synthetic construct
  misc_feature 1..1173: note = FG7-1
  source 1..1173: mol_type = other DNA
cctgcaacgcccctctatcacgcgagtgagggacaaggaacgtcaatgtggggagaagtaggtgacgctgtacccattgctcggtaccccaatccggagcctctagtattcctcagtgtgggttctaaccaatatggaagttgttacaggttgtatgaaattattcgccggacgtcagcacgcggtacagacctgagcatggtccggcaacggcgcacacacacccgcctagaatcgacagccatctatgtcgctggtaactccttttttgtgatgtgaccgcggattaattgtccgcgtattttacgcttttgatcgtgggtacgggtatagtgcagtgagagcatgcgaacggatcatgtcaatatacaggatagccaattggaaggggtcgatctgcgaacgatgacataggagaaacaatctgagactgccatattaaacggcaatgccccggattctaattgtacgtgttatcttttcctatctgggtccagtacccgcgcatcgatagtcagaatgaaaattacggttccacatccggtctgtcactttgtcctagtggaatggcgaatcttgttgcgacctgccacagtagcctccatggcgaccccccgttcactgtgaatggtcgagacctactcatcctttacatcgaacaacctctgcggtatgatgatacctgccacattatttgtgaaagtcagtttgcacgtaggcctgagaagacgtattaggacggcctacacaagcaattcatattgagcaaggaaaggagtggaagacctgaggagaaagaaagtcaaagaaaaacaaggaaaaataaatttgattgtattcagagtaatgccctgccaaggtccatatcgatccaaaggcgctacaatagaaaaagaaacgcaagtcacttcacatttatatcttgcgatcacgcggttttaatcttaatcagagcttacgagcttctttccctctatcttttgtagtattctaaatatcatttagtatcgaatgtctctgttacgtctttaacgtttttgtacaatccaaacgacattcgctacgggcttggcggtcggcgcatagctatagcagcgtgttaggcgcggttagctcgacctgcagggacgcttgacaaggactcgggagggaagaggaccattcctaaatcta

SEQ ID NO: 304 - DNA, 1201 bp, synthetic construct
  misc_feature 1..1201: note = FG7-2
  source 1..1201: mol_type = other DNA
aggggcgggggatgggcgtcaagtgttggccccgcagggggttgcccccacgggggggcccccacgaacagaggggtgacggggccggaactccggccgccactaaggcgcgggcctccggccagtggaatcttggttaactattgtacttgccgcggtgagagggtctgagagggattcgatgctaggataaaaatgatcaaaatgaagtgactgaaatgtacctctgtgcggatgggatcctaagccagtcggttaagcttagaccattggtgctaattctaaatggatgaattaaaataacgagaaaactgtagagttcatgccaccccctggtcatgcaaaatgtggtgtacacttccgagtgcaggggcgattcctcaaccaacgtagctttggagtcctcatgtgccgctgtggagacacgggattctcagttcgctttggctccgtccaagatttgcgtggctgtgtcacagttcgattgacagatgtcggacgtcaacggaagttgtaaagaaacaatcaaattgtaagtctgcgcaccttaaatgtaatggtcgaacaccgagttggagacgttacccgccctaggcagtggattggacaagttgagttagcttgacccccctggggagaaccaatgatcaccggaacttgtgttcaagccgacactgccgctccccggaggagctctcccggtactctgctgggacacgaaatgcagacctggtcctctctgaccggatgagcgccgagccaagaaaatggcagtgcatacgttccagagtgattccggtcctcgacacaactccatgtcgcggtgtggtccagcagtcgacagtgtgcgtgggcggggccgagccctcggcgcacggccgtcgccactgcagggatgacgcctttctacccttggcgtagcaggcgtgctggcgcatcgcaggcccttcctggctagcccgaaccaggaaccagccgcggttgggtcccatattcccatgcgggtcgtttgggcgtggtcggttccggcttgtgcgttggcgtggggggaggggaacgtagggcaccgtcccgtccgcttggctagttttcgattcttgctctctaggttgccccctacggccctccttcctcccccccgactctacggagccggaagcccccacctgtcccctggagaatgactctcgcgccccccgcc

SEQ ID NO: 305 - DNA, 1192 bp, synthetic construct
  misc_feature 1..1192: note = FG8-1
  source 1..1192: mol_type = other DNA
ccggactgccttgtgctggactacagcgggaaccgcgcgcaaaggcgcggcctggggcctgagggcctactcggacgcatgtggctgccactccgtccgcgtccgttcccgggctctcggaaccggtctcaaccggggaggcacgaccacccctgagccgccgccagaaagcggtgcaaaaggatgaaagaggagaccgggtttgtggaggagggtccggaccatcgagtccaaccaggtaccatctagccggcgccagcgctttcgcccagcttgtatgttaaggagtagactttccatgcttgggattcgtctcgagtcgacggaactggttcctagggcagggagcctcctggagtcaccaacctgccgcggacctagagcggtctagtagggggagaggttcatctccgagttgacgccctcccacgcccatgacaccattccgagactcggaccgcggctacgaattggggcgagcgtcggagaccggaacccgtccttctcgggataaccgggggctcgcggccgaccttagacgcgacacggcaccccgcccgcggtcgcggcaagaagccccccccgggaaggacatgcgttcagttagcgtaccgcggtcggtgcgcgtcgagtcggcgacacttctcaacaagaccccggagcgtgtggcgggtcccttacccgcgctggggcagccgctgccctcctcccaagcgatacccgacagcggggagagggaccacggcgcgaggggcgctggacggggacctcattgggcacaagcgccggcatagaagtacattaagctcagtgaaatcaaggctgcgactatgtgtcgggttcttcctcttaactcgtttaccttggatcgttttcacaaagtaacagaaggaaaagaaatactgagagttagacatagcagacattaacccgttggtagggacccaaacccggagacgctatataacccgtggacaacctctaatatcggctgtctcgcgctctctgcagctatcagaaaccgatttaggtaactctatcacgctgcccaaaaaatgaatagacgacgattaactctggagaggaccccacccccttccattctcgccagttctgtaagacgcttggttgaagcttgaatagtccgcactcgaagccagctgaatttgggggtattggtaaacaagtcatg

SEQ ID NO: 306 - DNA, 1723 bp, synthetic construct
  misc_feature 1..1723: note = FG8-2
  source 1..1723: mol_type = other DNA
tcctgcctgtcggtgttgcgcagactctcgttagcggggtgtgctgggtaaggtaacatctttataaccgtggcaattagtctatcaggaaacaatgacgaacagaggaatcactcactgtatacctcgatagcagaacggccttccgaagtgaccggctgacgtccagggttagcagatatctcattcaacaggaaatgacgggtggtagctgaaattttgactataattttctgatagctaaacctattatacaaagatacgtatggtaggcacatttccgtacttaaaaatgtaggagtactagctgttatgcataaaaaatttagaccgagtaatcctattcaggatcagcgtaagaacttgaccagtgacttcggaatgattgaaaataccaaattgggtaatttcgtgttcgaacaatgttagcgttgggcaacaataatgtgttaggttggctgtaatataaagtctaaggtagaggtgtaacaaaagattaccaggtctgcaacgtgatataatgctttcaccgacaagaattacaagttacaagggcacgctcttatatcgatctcggggctggagccaccatagccacgcgaggacgaagggagcactagcagtccttctctactccgtagagccttccccatgcggacgaatgaggacgtgagatcgggcgctctcctgcaccctgcacagtagcttgagtagcgcttacgcaatgtcgcatcactagacctgcaatgacttcaatgacggacgtacccttgagtgggctcgccgaaagtacattggaatttccgatctgtatggccttgttaacgtctgcctggtacttttcgctcccacccgtgaggcaaaaacaggatcattgtgaccccggatagcgaggctaaggccgataatagacctccgggcgtcaggcgcccagcagtgcagtgcgcggagcagtaaggtagtagggcgaggtaggaccgggctgcccgtatgaccctgcccccgaacgagaatctgaggggacaagtcgtcggcgctttaccggacgagcatctcctggccccaatggacgccatagtgccagcccggccagggctgggtgcggcgcgacccggggccgcaagaggagatgggagattggccccgctgagcctacagacgcttctcctatgtatcccgcaaccagaaagggatggggttccgtccgtggacaacaaccctatcaatcatctcgcccgagaaagggacgacttgtttctgttcggccgattgtggtcggctcccctggtagcggtgcaggcttgagtccgcggttcatgcgccacttgccttctagtgcctgccctcaggttcgacgcctgtcgtcccgtccccgatcgtcgtgttccccctcttacccccggtccccctgcaaaacgcacggctaatgtcaagccacggctgctctgtgctgggtcgccaccagtctccgatctcacttcctatacaatacgaccaacatcctcaccgcccctcagccgtcaattttcctggctaaccgccgttgtcttctctgggccctatagttgcgctggcggggctgatattcgtttgtaacatactggtctacgccgggccgcggtaacagcaaaaaggacacgtaccacttatacggtggcttttctcccccgcgtgctgctccagaggtgcagtttaattccctctgaattatagtagtgagtaa

SEQ ID NO: 307 - DNA, 3069 bp, synthetic construct
  misc_feature 1..3069: note = FG9-1
  source 1..3069: mol_type = other DNA
aagggggaagggggactggcgcgcggcaaaccggggcggcgacgaggccattgacgctcatttccttccttttgcctcggcgccccacccaacccatacaccccccctcagcgaccgcggcttccgttcttgcaaaggcctattccaggaggtacccataccacagccagtccagcacaacgaaacggagagaccaaagggatgaggaaaagtgagataaattcagtcgacggttattgaaagagaaaatcgaacgacagatccacatgatggctaacacttatccaactcagaaagtgagtgtaaagagggcaacggcgaagggttagaatgaacaacatgccagaaagattaagaatgcgtagaacttgaatcgagcgtatctaaagtagaatacttcgaaactagcgacttaggtgtttgagtacgcgagtctacaatagaagcagcatgcgttcctgttggtaagggagctggatgctgattctgatgactttcgactccccgggtcgagttgtttaagggaactcgagtacccagataaggccagaatgtttaactctgaagctctcgtctgctaaatagcaattgcgtcgcacagtttcgcaaataacatataaatcgacggctggatctcgtagcaccaaggtgcgatatcatcaatgctaaccttaattagctaagaaagaagtgcaacaatctcagagctttctttttagacacccgaacccgaacgtttgtttaccctcagcctcgtgccaggcctgctcatcaatactcctagattcagacaggaatacaacggtggaccgaatatcggttaggcttgtctgattgtttctttagaccactaatggtaagagtccaaaaatataaaaataatttcctgttcggagtgaaaagtaaatagagaaagctatggaatgaagaattgagtgaaacagtcgaaactgagaaggaacgggatgaagaagagtgagcaatgatgaagcaactggggacaacgatacgtcgcgcgtgcaaagttccctcgcgccgcttgctccacggacccagggacagatgcttgcgtttcctgatggcatagactctaccttatcgtccggcatcgcgcgtggggcccactatagtcagaccgccgggctgcgcgcccgctattcaggacgacggcccgtgaaactgcgaaggcctgggactgttctctccctgcaatgtccgcgccgtgacaaagagatcacatcacgctcagcacggcgtctctcgtaagacgccgggcataaccccgggagtgccctggccagctgtggagggtagggaccttgaggaggaccctcttcgatggtaaggcctgaccagggcgggagcccgcaaccggggacccctgggcctcgcggagagcgtgagggccagcaagccagggggccgctcccgtacccgcattcagataggcgccgctcgtagccctaggcgagaggccggggaacagaagccatggatgaacgtagcaggagcccccgagcgggctcatcccgggagtggagtgcacaggaatgtcccgaacgctgcgcggggggaactaaagtgcatgtgccgaactaacctcgatagggcaccccatccgtcgtcacgaaatactccccgtcgttaggtctcggctgttcgcccccccgggcggcgcctttatccgtccccgaacacacgaccatcgaatgcacagttcgacctgcgcgttaggcttcgtcgaatcaacagaggatccctggtcggccatgcgtactatagacgagcggagcttcttcgggacgaagtccgtcgccaacgatggacgcgcacccgtgacgggggtacctcccagaccaatgaagccccgagacacgcgggcagccgaatcgcgggctccttaaaggccacgagccctcccggcggtcccacacggacccaagaggccgccgccccgcctcaacctagagccacaaccgccgaccagatagaccgcagggtccgggggtggacatctgaaaaaggcgagccggcggcgcagaggaatcccctggcgctgcgtctggcgcatgcccggcgggtccctgctgtcccgagcgagcgttagcaattgagcactagggccacacagcaggcgacagcacatcggtagggctctggccctcgcattgtgcacaccgtgagatcacagtacgcccgcaatcccgctgcttggttatttcggcaggtcccctcgaaacatccactcgagcaaccccaagtgagggacgacctcccactggaggcgtccgccggaccggacgcgcaagccgaaccgggtgggccgtgggctcccatttcccttcacgccacagcccagccatgaaccaccgcccgttacgcagaggggagacagaaacagccgtcagctccgcacgctataggactttcgggtgggtgggacaccggagcggctgcgagcggactacgagcggttcagaccctccgcaccacgtgctagaggcgggcctagggctctggtgggcgcagacagaatcttcagaacggggacccgctggggacgccgcatccctgtcgccgggcgcctgtgacggtggcagtgtgtgcggttcgggcggggcagcgatacgttcgccctctcacgtactgtgacggcgaggcgccaccctttgcgacacccgcgtatcaggctaacctatcgtgccggtccctagcccccggcgaaccacgaatcatggggccggcatcggtattcgaccaccacggtcgccagggagacgcgtaagaaccgcgcctggtggcggttgcggcgtccctgtcgggttggtcgtccgctccccggtgtcgttgggccagggacagcgctcgcgaaacaccgcgatccgggctgcacagactgggcgggaattggcggagcgaccaggcccagccgctgcaccccccctgtggcctgggctagcctgggccgctgggtcacacaaggcaccatcccccccgcaactgggctgccagtcataggtgaccatactcgctcgccgatacgatcctgagcatggtggtaccccgggg

SEQ ID NO: 308 - DNA, 3145 bp, synthetic construct
  misc_feature 1..3145: note = FG9-2
  source 1..3145: mol_type = other DNA
gtcgcggtacgaatgcgcgaacccagaagaacaaggcgtgggaccgggggtggatcacggggtgcaatcccccggctcggctcgaggctgttcccgaccggtgacaacagcgggaggccggcggatggtggagggagttttcccgagctggccaagtctcccccttctggtgagggcggacaaggaggcgcatgacgtcataggccctcttggtgctatgagtggagaatgcaatcatgcgtaggcacgcggagcgcaccactcatttttcggcccaaccagggctcatgaagttgtacttttgtgatcggggtacgccaagccggctatcacccagcgcttacttcctcacgcgtccgccctctgcaaggtagactagatagttatgtgagcaaagcgtagcttgctctcctagacccgctcaaaccgacggtactataaacgcacgtctatcgtcaaacggaaggtcggcatagaaacgtggcatatggggaagctactaccaaccagggggtcgaggcgcgtgcgttcggaaccttcgccgaacaccttgctcccaggcggcactcctggcccataagagggcagcagggatggcacgctagaggctggggtctatgctctcagccgttcggaggtacggtcctagcccccttgaagtatacctccggggcgtgccaaccagtaccaacgtcatgacccttaattccgtcggaatcgacacgcacattgccctaaaccaactacgtctatccacgcaggcgctacccttgtgtgagttcggcgcgggagcagcccgctattcgtccgggaaatagtagaagacaggcaagtcactcctaaacgggaatgcgaaaccgctcatatatggtgacattcttaggtggcttgctccaatagcgcaaaagtaccgtgaaggaagaccagcaactgatgtcacatgccctcggcagaccggactgagaggctgcataaggaaggacaagccgcgcttgtacctcatggctcctcggagggaacgtgacaccccaaattctatgctaaatcaccgaacgtcgttaccggtttaagatgcgatcataaccccaacagagggggaacatcgggctagtactagtgtgaaccttcaggtaccagacggactagagaaatgtagggtgaccagtccctcctcttaacatcgcacagtgtcgttggacggtcacgtaggaaggctgcgtgtaaccgaagcgagagccaaacgccagcgcttgccgcgagggtaccccggaaacggcaggctccgcccgaccctaaaacggtggtgaccgaggaggaaaatggctaactagcggtcgtgccaacgtgttgcggctgcggctttagatctacgggcgccaagcgcttgacgggaggatcaacggcacgacggtcttttgccctcaagttttaggggtacagtaagcccgctctaaacactgttgtgcggacacccgaccagcacgggataccgttacccaggctggccaacacggtcgaactgcagattgctgcggtaaaggtcggcgccggcaacttactgaagctcttgccgcggtttataaggtctcctcctggcaggccgagcgccatggcgctacgaggaggtccggcatcatgatgccctatctagttcgacgtagcaccagacgggacggggcgttccacgcagttttgacgaccgctcgggcagaaaacacggcgatggcgggagtacggtgctgatcactcaccgtgcccgcggtaatgtcacggcgagccgctgccggaatgcccctcctaacgccctcttgcggccgtccgcggcatccgtcctctgtgggtaattgacaccgttggccaactcctctccttgtcggcaccaaccaggacatcaacacttgggtttgcgcagatgggcgcaaccccgtgccgcagccaaggcgcctgtggtttacggatgaacccacggctcgatgtgttacttgcctggaccgtggtagcggtgcctgagcggtcggctcctgcgacaacctattgtcgccattccttggtccctcgactccacaacttgtgttgcggaggcgtggcgctagattaggtgacatggccccagcgcgattgaggacggcggcgtcgtactggggtagagtgacgcaaagccccgggatctatcctaagctactataccttcgaagcgccgccatcgccggcgtgtgtccgtgcgcttgggcccctcccgaaatggcgggcgcgccgatactgggtaccgtgggccaattcaatcggacgtggggcgcggctcatggtctccacctaggcccgagccatgccgccacccggagctgagtccttctgtctatcagtacggggaggaagtgactggacgagccggtggggggggtttgcttcggagcccttgagcgggacgccggtacagggcccagagaacgccgtaccgttgggacggggctcgttaagcgcccacaccagccttggtgttacaggccttgacccaggaatggtttagtacatctgccccctcgtgaagccgggacgtcacaggagaagatgttcgtgcataagaaggaatattacaatataatggtaggcgggctagaagtaataacaaattgtggctaaacctcgggctaaccggaacttcctacgtaaaaggaaaagtgaacaaggaaaaattaatgcaaataaattacggacttggcgcagtaaaaaaacaggatatcaatccaaagaaatcgaacctgtcgatcgaccagagggatttgtgccataagaaatagtagcgagaaaaagtacaacggagaaagagaaaggcaaactaccgcagtgaccgcgaagcagactaaggcggggattaactagctctgaagatcaccatgggctatagcctcagaaatcgggaaacggggaagaaaagaagaattagcaagactacccccagaccagaccggtaattcggcttcgtggctttgaccgcgacatcggtacaggaaggccagggggggtgatgggtgggggggagcgtgcacgagcggaaggaaatatcttattagccactaacggttggttattgctatgcccctttccgagaaatgttcgcgaagttgagtagcttagctggtccagt

SEQ ID NO: 309 - DNA, 1104 bp, synthetic construct
  misc_feature 1..1104: note = FG10-1
  source 1..1104: mol_type = other DNA
accgcgccttctctgccccgtgcgggggctctggtgctggccccgggcccacgtccaggggcctggcggtctggctccgtcaggctgacccttgtctcttgtcgcgctgcacgcggtctcgcccggcgcggttgtcagcggcggccgctgcatcctgaactcccgcggtttcgggaccgtccaaagggctcggtacgcatcctggccttcgttttgtgagtaagaaatctcgttccactgggtactgctcctcgtcttccctctcctaactacggcgagaaatcctcaccactaccatactcacgactttgatggcgtccgagcccctaaacgttcactcgcatgacgtgctagtcccgatggtttaggagacaaatgggctcgcctccgccccgcacgacctaggtaagcgatatggagcctcggggtggctgcaaaggtaccatcgactcacgaagcgatgacgccaggacatgatcaccgacaatcgggtactacggctggagaggttattgtcatctaattctagtttggtcttgaaccgaagatcccttatggcctctttcgacggaaccaataagactacgagggctggaaaaatatcgttaagtgacgaatacccggctgcttcgtcgttcacaacttctgccgaccgctacccactcactgtcgtgacagagacgcctctacaacgtcacgctgtagacctcacaagggctacggataggataataccggggcattcgtatttgattaccaggccacgcctttcctccaagtcttccgagagtcaggctacccgaacgatacttacttagataacctagtcccggccacgacaaagacgaccgaacttctgttaagaccttaaaggaactacaaacgaccccctaaggatccgcggacaagccggcgcctcaattttcttccccggtggcccgagttttcttattatgccttatattatttttgtccgttgtggtctctgtatggttactgttaatatctctggtattttggttcgtttgtttattctgtaaagttccctatttttgttactaatgattactgacggcttgtatttattatatgtccttaaaagct

SEQ ID NO: 310 - DNA, 1121 bp, synthetic construct
  misc_feature 1..1121: note = FG10-2
  source 1..1121: mol_type = other DNA
atggatgggtgtgggaatggcatccggccaactgtagtcgggttctcttgactcggaggaaatgcttagcctgtgtgacgaggtttgcgcccgagcgcgatctccgtacggagatggtagtcgcgacataggccatgtgcgagccgtaggctcgggccaatcacagcaccctcatcgatactccgttgtacttagatcgtacctacagcgagccgatcgagatttggtgtacagtttgtggaacaagcagtttccaatctaccgcacagtgacgatgcgccagattatctcatcagcagcggatcgatagataaccacacattgatgctcgtaagttgtccccccaggcggctgcgcctgctaggtcacccaaccctggtaccaaccacaggacgaaagaatggattcgctaaaatggagcggaggtgtgggcaaaagcgcacgagcgtgtcctctcaactgtccacctccacttgtggagttgcctggccggggtttctacattctagaccaggccggtctagaacgatatggcaaggcgccggagctgtcgtcgcgcatattccgcctctactggaaggccagcgccggacgcgcccctgaaatccacgcttgatcgtaggcatgccgccaggtacaaggctctttgtgcggcaagagtcctcggtggcactggagggtgtctttggatagcacgctgtcccgggagttcctatggatatcggagccgccagataactcaaattgcgagaagattggggctggatcgttgccccgtgagcggggtaaccttcccgactggcccaccaaggaaccatttgttttgcgcttgacacatcccgacttcttgcgcatttcggccgtgagggggcaccagggtgcctatttacctggggcttccgccagcctagcgtcccggagtagtacctgagctgttcgcgtgagctaactacccccgatggtcagcgaacgacatgttcggcgggaggtcctagctctgcgcccgagacgacggtcgcgagtgcgtcagtcggtctatacactctcactccaccgggagcaaatgaggggtgacaaagtcaaaggccgagccccatggagcgcataatatctagcgcgcc

SEQ ID NO: 311 - DNA, 881 bp, synthetic construct
  misc_feature 1..881: note = FG11-1
  source 1..881: mol_type = other DNA
ggattggcccctccgcaacgattgggcaccgccccccctctacgctctcggtctcgaatgttcttggtctttcttatggcggacagctcctgggtaacgcagccttactacccggcgaatagtagtggatgtcagagtggttcatctcaagtggagcggcatggcaccattaggcggggcggcgcgcaagagacgccagcgtgtaagtgaaccactcacgcgccagcccagtgcgcatcgaacgggcacacagtccgtggcgggctccctcgaaaacgaccgcgatcggatacattggagcgctcgagtacggcgccggctgcccggcggcgcccatggaacagtcccagaccgaataggctagggaaacgaggtcataggatgggttggatagagtatttgctcgcaccgttgagggattcgggcaattacgctggcgaaaggcgttgtgagggctcccgatgccactagtagtgaacttggtcgcaggggagtaacgctgagtccgcagatccgtcctaggactcgcaagcgggcacctaatgccgtacactaaggcaaacccactcaaaacgaactgctagattgggcgttggcacaacacgagcgtcacgcctagggccacgcaagaaccggcctggctagtcccaacgcctgcggcgcgagcggaatggcaggcaaactaggcgctgcggcggggggtgtacaccaggaacatgcacccaaccgacgggacggggcggggagggaaagcgcaccgaaatccgggggggccttcgtacctgcgccgaagtaagcaagggggaccgatgctctccagccgcaccccggctcggcgcccccgtctgcggacggcaccgcctttggtccctcatgctgtc

SEQ ID NO: 312 - DNA, 1092 bp, synthetic construct
  misc_feature 1..1092: note = FG11-2
  source 1..1092: mol_type = other DNA
gggcggggagggtttgcaggtcgacctgcggagtccggctctaccccgcgcttcaggcaggctcggcggccccacttcggcccgcggctccacccccggctccgctccggcccaactgaaacgctccacattagactgaaagatgagaactggcggatacgggataaacaggtcccggatgttttaccttgttgtcagggagaagagaactaggtctaaatgtagggcaagaggtgtgagccttcgcagggatgtaattaagaaactcggggttagttcgcgcggttactcctgtctgacgtgaagcgagcgaagtcgacaagcactgcgaaggcacttctatggctgggggcaaattccgggcctctggcaggggcttcaggattatcgcaccatgtaaaccccgacgccgtaccacggcccgggacccttgcggaacccttcggccggtacggagacactcttcgacacatgactggcccgggcgtcgcgaatattcgagtgatatgctcttcccatcctggagacgagtggtggcgggcccctatagcagagcactatctggagccgccgaggaatgaaacagagctaggattcaacactagtccgacctcccacctcgtttacgctaatcaggtcgtcgccgccgagcgcgggcacctagtcgggttccgggggcaccgaaaatactggaatcataatccgggcaggaaaggtcctggtgattgcagcatgcctcggccggcttaaactcggcccatccgcaggactctgcacatagccccatctcgctcgagcaacctagccacatcgcccgccccctggggcctcgagtcgaccgtgctccggctcctcctccgtccgccaaccacagtagtatcgtgcctcaggacctaccccgcgcgcgttcacaccaacgaccgcagctctggaccccacgcccctgttgcgggtgccttggctgcgcataccgccccccgctcagcttcggccatagacggcactccgacccccgccactctacagggttgccggcccaaggtccgctagcagccggcgcagatcggcatgtggaaggggccgtcccccttg

SEQ ID NO: 313 - DNA, 510 bp, synthetic construct
  misc_feature 1..510: note = FG12-1
  source 1..510: mol_type = other DNA
aggcagtgggagtcccgccagggaggcaggtgaccaatgctcttccgagctcctgggaccaaccactgagacgtcgttgcgctcaccggacccgatgctacaaacccgaggtgcagcgttgacagctcgtggatagccgggctggagttggattgcatcgggcgttattttcaaggggagttcggtgcaggaaactgggatcggcaggtgagaggtacaagagttggaggaccgtacggtctccccagcctacggtccgtcacacgattacaccttctcgcgacgcgtggacccatgaatataccctcacccctcgtgaaccactattctggggcaaacgaccgcccgggagcaggcgttcatcggacgggctcaccgctgggagcaaaggtcgttacggaagaatatggatgtagggtaccaatactaagggtaggactggcggggcgtgtgggggcgaacgtactaagaaagttgtaaccctcgaggcggcctccactcaaatcgacc

SEQ ID NO: 314 - DNA, 814 bp, synthetic construct
  misc_feature 1..814: note = FG12-2
  source 1..814: mol_type = other DNA
ggaaatattttgcgtctcacacgatcgcgagggagttacgggtaacacctagcgggcccgtcgtccgacgccaggcgcccaggccatcggcccccaccgcaaaggctgttaatctgcacgtatacccgactggcgcagttttgagacctggaccttgatccttttatctctgtcctgcttcttgttcttgtcggggccgttttagtcacgcttttggttatacacggccatacttatcttgcgcgctagcagacatattgaagaagcatgtgtcgctgtgatcggtgtaagcgcggataaagccgtgcgatcttccagcaggtgaaggtcgaggaagcaggacgcgcccaggagctgtccgtgtgagtgtaagaggtacccgattgcgagagcggatcacaccctaccgttgcccgatggaacgctggcgcggtctaccgctcgctgaacggctccgtgaacggtacttccgtccccttaatgtatgggcccacgctgtcttagagcgcgctaaggtgatttgtcgaggtggaggagacgggcgactgcgggaagagaagtccctgagccatgtaccttgcggtgaggaaggcgcgagggggacgggcggttcttccgtactgtggaggggccgcgcccaataatggtcgtgtctgaatgtttactgcgcctccgtaacgcggccgcctcttgacaccgcggctccctacccgcctcgggcgagtgagcaggtttcagagagagtctaacaagagggttctcttatctcgccgcagctcgtacaacatccccaggtaactatgtgcatcattct

SEQ ID NO: 315 - DNA, 160 bp, synthetic construct
  misc_feature 1..160: note = DNA standard
  source 1..160: mol_type = other DNA
gccgcagaaagatttctctctactgtccattcacactaaaaaggaagtaagggaacaactgccacgggatctcaggtcgagtggtgttcaggatgagacatgaaacgtggaaactggggactggggctcctttggtcccttctggaggtcttatttccgg

SEQ ID NO: 316 - DNA, 160 bp, synthetic construct; identical to SEQ ID NO: 315
  misc_feature 1..160: note = DNA standard
  source 1..160: mol_type = other DNA

SEQ ID NO: 317 - DNA, 160 bp, synthetic construct
  misc_feature 1..160: note = DNA standard
  source 1..160: mol_type = other DNA
acacagccattaagaaaaaaaaggaaagaaacacccattatacgttacaatcaaaacaaaaacttcattttctaccttgaaccttttagacgaaaaacaatggacaacaaaggaataatttgaatactctacaccagagataagacatactgattacaac

SEQ ID NO: 318 - DNA, 160 bp, synthetic construct; identical to SEQ ID NO: 317
  misc_feature 1..160: note = DNA standard
  source 1..160: mol_type = other DNA

SEQ ID NO: 319 - DNA, 160 bp, synthetic construct
  misc_feature 1..160: note = DNA standard
  source 1..160: mol_type = other DNA
caatatcatagactacctcaggaagggctccttcagtttgagatggtgtataaggactggtaggttgagacccacatctaactacacgaggtgtgcttcactcgtcgtcgggtgtcacaggcgacaaagaggaaggaggaaaagtaacggacgagagtct

SEQ ID NO: 320 - DNA, 160 bp, synthetic construct; identical to SEQ ID NO: 319
  misc_feature 1..160: note = DNA standard
  source 1..160: mol_type = other DNA

SEQ ID NO: 321 - DNA, 160 bp, synthetic construct
  misc_feature 1..160: note = DNA standard
  source 1..160: mol_type = other DNA
gagatccgaaaaagaactagtcccctcgtaccccactttagactcgcgactgtgggagcacaccagtcttgaccggagctactaactcaggagagaacggtgtgacttctcgactacaggacacccctccttctcttgggggagaggtacaaggagacct

SEQ ID NO: 322 - DNA, 160 bp, synthetic construct
  misc_feature 1..160: note = DNA standard
  source 1..160: mol_type = other DNA
aaggagatccgaaaaagaactagtcccctcgtaccccactttagactcgcgactgtgggagcacaccagtcttgaccggagctactaactcaggagagaacggtgtgacttctcgactacaggacacccctccttctcttgggggagaggtacaaggaga

SEQ ID NO: 323 - DNA, 160 bp, synthetic construct
  misc_feature 1..160: note = DNA standard
  source 1..160: mol_type = other DNA
agttactgttacaagactttaaactacaggtactaccgacgatgacaaagaaggactccggagtcgtctcacccaggtttgtggtgtggttccaaacggtggcagtagtttaagacgaacaccaacaatcgttgtgaccctccttccttttcttttccat

SEQ ID NO: 324 - DNA, 160 bp, synthetic construct; identical to SEQ ID NO: 323
  misc_feature 1..160: note = DNA standard
  source 1..160: mol_type = other DNA

SEQ ID NO: 325 - DNA, 160 bp, synthetic construct
  misc_feature 1..160: note = DNA standard
  source 1..160: mol_type = other DNA
agtctatcgctaccactcgtcgaccccgacctctctgctgtcccgaccaacgggtcccaggggtccggagactaaggagtgactaacgagaatccagaccggggaggagtcgtagaataggctcaccttcctttaaacgcacacctcataaacctactgt

SEQ ID NO: 326 - DNA, 160 bp, synthetic construct; identical to SEQ ID NO: 325
  misc_feature 1..160: note = DNA standard
  source 1..160: mol_type = other DNA

SEQ ID NO: 327 - DNA, 160 bp, synthetic construct
  misc_feature 1..160: note = DNA standard
  source 1..160: mol_type = other DNA
acgagtctatcgctaccactcgtcgaccccgacctctctgctgtcccgaccaacgggtcccaggggtccggagactaaggagtgactaacgagaatccagaccggggaggagtcgtagaataggctcaccttcctttaaacgcacacctcataaacctac

SEQ ID NO: 328 - DNA, 160 bp, synthetic construct; identical to SEQ ID NO: 327
  misc_feature 1..160: note = DNA standard
  source 1..160: mol_type = other DNA

SEQ ID NO: 329 - DNA, 160 bp, synthetic construct
  misc_feature 1..160: note = DNA standard
  source 1..160: mol_type = other DNA
gatactcggcggactccagaccaaacgttgaccccagagaccctcctccccaattcccaccaacagtcaccgggaggtccactcgtcatccccccgaaagaggacgacgaataaactggagggatattggggtactctacacgtttcatttacccaaatt

SEQ ID NO: 330 - DNA, 160 bp, synthetic construct; identical to SEQ ID NO: 329
  misc_feature 1..160: note = DNA standard
  source 1..160: mol_type = other DNA

SEQ ID NO: 331 - DNA, 160 bp, synthetic construct
  misc_feature 1..160: note = DNA standard
  source 1..160: mol_type = other DNA
gtagtgtgaccttctgaggtccagtcctcggtgaacggtgggacgtgtgaccggacgacacggggtcggagacgaacggagactggggacccgggtggagaatggctaaagaaggtatgatgatgggtaggtggagagtagtgtaggggccgccccttag

SEQ ID NO: 332 - DNA, 160 bp, synthetic construct; identical to SEQ ID NO: 331
  misc_feature 1..160: note = DNA standard
  source 1..160: mol_type = other DNA

SEQ ID NO: 333 - DNA, 160 bp, synthetic construct
  misc_feature 1..160: note = DNA standard
  source 1..160: mol_type = other DNA
ctctctggccgcgtgtctccttctcttagaggcgttctttcccctcggagtggtgctcgacgggggtccctcgtgattcgctccattcgttcgtcctgttcttcgccacctcctctggttcccacgtcaatacggagtctaagtgaaaatagtggaaagg

SEQ ID NO: 334 - DNA, 160 bp, synthetic construct; identical to SEQ ID NO: 333
  misc_feature 1..160: note = DNA standard
  source 1..160: mol_type = other DNA

SEQ ID NO: 335 - DNA, 160 bp, synthetic construct
  misc_feature 1..160: note = DNA standard
  source 1..160: mol_type = other DNA
tcttcgccacctcctctggttcccacgtcaatacggagtctaagtgaaaatagtggaaaggaacggagaaaggatcgtgacgggttgttgtggtcgaggagaggggtcggtttcttctttggtgacctacctcttataaagtgggaagtccatgattcag

SEQ ID NO: 336 - DNA, 160 bp, synthetic construct; identical to SEQ ID NO: 335
  misc_feature 1..160: note = DNA standard
  source 1..160: mol_type = other DNA

SEQ ID NO: 337 - DNA, 160 bp, synthetic construct
  misc_feature 1..160: note = DNA standard
  source 1..160: mol_type = other DNA
gttcgtcagtgtcgtgtactgcctccaacactccgcgacgggggtggtactcgcgacgagtctatcgctaccactcgtcgaccccgacctctctgctgtcccgaccaacgggtcccaggggtccggagactaaggagtgactaacgagaatccagaccgg

SEQ ID NO: 338 - DNA, 160 bp, synthetic construct; identical to SEQ ID NO: 337
  misc_feature 1..160: note = DNA standard
  source 1..160: mol_type = other DNA

SEQ ID NO: 339 - DNA, 160 bp, synthetic construct
  misc_feature 1..160: note = DNA standard
  source 1..160: mol_type = other DNA
agaggcgttctttcccctcggagtggtgctcgacgggggtccctcgtgattcgctccattcgttcgtcctgttcttcgccacctcctctggttcccacgtcaatacggagtctaagtgaaaatagtggaaaggaacggagaaaggatcgtgacgggttgt

SEQ ID NO: 340 - DNA, 160 bp, synthetic construct; identical to SEQ ID NO: 339
  misc_feature 1..160: note = DNA standard
  source 1..160: mol_type = other DNA

SEQ ID NO: 341 - DNA, 160 bp, synthetic construct
  misc_feature 1..160: note = DNA standard
  source 1..160: mol_type = other DNA
acacctcataaacctactgtctttgtgaaaagctgtatcacaccaccacgggatactcggcggactccagaccaaacgttgaccccagagaccctcctccccaattcccaccaacagtcaccgggaggtccactcgtcatccccccgaaagaggacgacg

SEQ ID NO: 342 - DNA, 160 bp, synthetic construct; identical to SEQ ID NO: 341
  misc_feature 1..160: note = DNA standard
  source 1..160: mol_type = other DNA

SEQ ID NO: 343 - DNA, 160 bp, synthetic construct
  misc_feature 1..160: note = DNA standard
  source 1..160: mol_type = other DNA
gtcagtgtcgtgtactgcctccaacactccgcgacgggggtggtactcgcgacgagtctatcgctaccactcgtcgaccccgacctctctgctgtcccgaccaacgggtcccaggggtccggagactaaggagtgactaacgagaatccagaccggggag

SEQ ID NO: 344 - DNA, 160 bp, synthetic construct; identical to SEQ ID NO: 343
  misc_feature 1..160: note = DNA standard
  source 1..160: mol_type = other DNA

SEQ ID NO: 345 - DNA, 160 bp, synthetic construct
  misc_feature 1..160: note = DNA standard
  source 1..160: mol_type = other DNA
ctttcccctcggagtggtgctcgacgggggtccctcgtgattcgctccattcgttcgtcctgttcttcgccacctcctctggttcccacgtcaatacggagtctaagtgaaaatagtggaaaggaacggagaaaggatcgtgacgggttgttgtggtcga

SEQ ID NO: 346 - DNA, 160 bp, synthetic construct; identical to SEQ ID NO: 345
  misc_feature 1..160: note = DNA standard
  source 1..160: mol_type = other DNA

SEQ ID NO: 347 - DNA, 160 bp, synthetic construct
  misc_feature 1..160: note = DNA standard
  source 1..160: mol_type = other DNA
ctcttagaggcgttctttcccctcggagtggtgctcgacgggggtccctcgtgattcgctccattcgttcgtcctgttcttcgccacctcctctggttcccacgtcaatacggagtctaagtgaaaatagtggaaaggaacggagaaaggatcgtgacgg

SEQ ID NO: 348 - DNA, 160 bp, synthetic construct; identical to SEQ ID NO: 347
  misc_feature 1..160: note = DNA standard
  source 1..160: mol_type = other DNA

SEQ ID NO: 349 - DNA, 160 bp, synthetic construct
  misc_feature 1..160: note = DNA standard
  source 1..160: mol_type = other DNA
gaacttgtcgaactccatgtccaacctctcgaggtgcaacctcgggtaaagaccgtccgctagttcctctataaggtggtcttagcatcgtttgtctcgtctccatcatcctaaacggttcttccttaaccgttgttagacagttatgttctttgtgtac

SEQ ID NO: 350 - DNA, 160 bp, synthetic construct; identical to SEQ ID NO: 349
  misc_feature 1..160: note = DNA standard
  source 1..160: mol_type = other DNA

SEQ ID NO: 351 - DNA, 160 bp, synthetic construct
  misc_feature 1..160: note = DNA standard
  source 1..160: mol_type = other DNA
aaacgttgaccccagagaccctcctccccaattcccaccaacagtcaccgggaggtccactcgtcatccccccgaaagaggacgacgaataaactggagggatattggggtactctacacgtttcatttacccaaattgataacgtgtcaacttttttga

SEQ ID NO: 352 - DNA, 160 bp, synthetic construct; identical to SEQ ID NO: 351
  misc_feature 1..160: note = DNA standard
  source 1..160: mol_type = other DNA

SEQ ID NO: 353 - DNA, 160 bp, synthetic construct
  misc_feature 1..160: note = DNA standard
  source 1..160: mol_type = other DNA
tctctggccgcgtgtctccttctcttagaggcgttctttcccctcggagtggtgctcgacgggggtccctcgtgattcgctccattcgttcgtcctgttcttcgccacctcctctggttcccacgtcaatacggagtctaagtgaaaatagtggaaagga

SEQ ID NO: 354 - DNA, 160 bp, synthetic construct; identical to SEQ ID NO: 353
  misc_feature 1..160: note = DNA standard
  source 1..160: mol_type = other DNA

SEQ ID NO: 355 - DNA, 160 bp, synthetic construct
  misc_feature 1..160: note = DNA standard
  source 1..160: mol_type = other DNA
tggtccaggaattgacggaatagtaagaacagccggagtcggaagacggcgtcgcagaggtgttaccccaccagtcccaactagaggtccacgaaaaaccggtagtatatcgggtaccacctcaacagggcttcacggacccgaaagtactaggcgaggt

SEQ ID NO: 356 - DNA, 160 bp, synthetic construct; identical to SEQ ID NO: 355
  misc_feature 1..160: note = DNA standard
  source 1..160: mol_type = other DNA

SEQ ID NO: 357 - DNA, 160 bp, synthetic construct
  misc_feature 1..160: note = DNA standard
  source 1..160: mol_type = other DNA
tgcctccaacactccgcgacgggggtggtactcgcgacgagtctatcgctaccactcgtcgaccccgacctctctgctgtcccgaccaacgggtcccaggggtccggagactaaggagtgactaacgagaatccagaccggggaggagtcgtagaatagg

SEQ ID NO: 358 - DNA, 160 bp, synthetic construct; identical to SEQ ID NO: 357
  misc_feature 1..160: note = DNA standard
  source 1..160: mol_type = other DNA

SEQ ID NO: 359 - DNA, 160 bp, synthetic construct
  misc_feature 1..160: note = DNA standard
  source 1..160: mol_type = other DNA
gtgaccttctgaggtccagtcctcggtgaacggtgggacgtgtgaccggacgacacggggtcggagacgaacggagactggggacccgggtggagaatggctaaagaaggtatgatgatgggtaggtggagagtagtgtaggggccgccccttagaggaa

SEQ ID NO: 360 - DNA, 160 bp, synthetic construct; identical to SEQ ID NO: 359
  misc_feature 1..160: note = DNA standard
  source 1..160: mol_type = other DNA

SEQ ID NO: 361 - DNA, 160 bp, synthetic construct
  misc_feature 1..160: note = DNA standard
  source 1..160: mol_type = other DNA
ctaccactcgtcgaccccgacctctctgctgtcccgaccaacgggtcccaggggtccggagactaaggagtgactaacgagaatccagaccggggaggagtcgtagaataggctcaccttcctttaaacgcacacctcataaacctactgtctttgtgaa

SEQ ID NO: 362 - DNA, 160 bp, synthetic construct; identical to SEQ ID NO: 361
  misc_feature 1..160: note = DNA standard
  source 1..160: mol_type = other DNA

SEQ ID NO: 363 - DNA, 160 bp, synthetic construct
  misc_feature 1..160: note = DNA standard
  source 1..160: mol_type = other DNA
ctcgaagtagacggtttcaccagtcaagtagtaagacaacggcttcaagtctctagaggaaaagattgagaagtgttgcataagctattagtagaaaccgacgaagatcagacattggctatattttatctggttctttcgtgataaatgacggaggagt

SEQ ID NO: 364 - DNA, 160 bp, synthetic construct; identical to SEQ ID NO: 363
  misc_feature 1..160: note = DNA standard
  source 1..160: mol_type = other DNA

SEQ ID NO: 365 - DNA, 160 bp, synthetic construct
  misc_feature 1..160: note = DNA standard
  source 1..160: mol_type = other DNA
ctttccggttgtactctttcttcgtcgtctagcttttgcgttcgttctccttgtttacctttgactcgtcattcataaaaaaaaaaagatttaaaacccaagaaaaatttccgatcgtaccttaaaaatttattatctgaaagtaaaaggtctgaaatac

SEQ ID NO: 366 - DNA, 160 bp, synthetic construct; identical to SEQ ID NO: 365
  misc_feature 1..160: note = DNA standard
  source 1..160: mol_type = other DNA

SEQ ID NO: 367 - DNA, 160 bp, synthetic construct
  misc_feature 1..160: note = DNA standard
  source 1..160: mol_type = other DNA
gcacacctcataaacctactgtctttgtgaaaagctgtatcacaccaccacgggatactcggcggactccagaccaaacgttgaccccagagaccctcctccccaattcccaccaacagtcaccgggaggtccactcgtcatccccccgaaagaggacga

SEQ ID NO: 368 - DNA, 160 bp, synthetic construct; identical to SEQ ID NO: 367
  misc_feature 1..160: note = DNA standard
  source 1..160: mol_type = other DNA

SEQ ID NO: 369 - DNA, 160 bp, synthetic construct
  misc_feature 1..160: note = DNA standard
  source 1..160: mol_type = other DNA
agtttatcaaaggagtaaagaaggagtcactacagccctccttctaaagggtgtttttctgccgaagcaacccacttccagaagagaggaccaaaagattttaagaagtccagttatcagttcggaagtagactctcttctgtgtgtcagtgaattttct

SEQ ID NO: 370 - DNA, 160 bp, synthetic construct; identical to SEQ ID NO: 369
  misc_feature 1..160: note = DNA standard
  source 1..160: mol_type = other DNA

SEQ ID NO: 371 - DNA, 160 bp, synthetic construct
  misc_feature 1..160: note = DNA standard
  source 1..160: mol_type = other DNA
cagaggtgaccagatagagataggactgtaagggttcctcctccgtaagcctttcataacagccggtctctcggtcctcgtaggacttcgactgggtccatcaacaactaaaaggtacaaggaccgtaaattaaaaacccttttcaacctttaaaaccct

SEQ ID NO: 372 - DNA, 160 bp, synthetic construct; identical to SEQ ID NO: 371
  misc_feature 1..160: note = DNA standard
  source 1..160: mol_type = other DNA

SEQ ID NO: 373 - DNA, 160 bp, synthetic construct
  misc_feature 1..160: note = DNA standard
  source 1..160: mol_type = other DNA
ttgtacagtaaacgactttagtagtacccgatattctagtacctacgatggttataggaccacagaggtgaccagatagagataggactgtaagggttcctcctccgtaagcctttcataacagccggtctctcggtcctcgtaggacttcgactgggtc

SEQ ID NO: 374 - DNA, 160 bp, synthetic construct; identical to SEQ ID NO: 373
  misc_feature 1..160: note = DNA standard
  source 1..160: mol_type = other DNA

SEQ ID NO: 375 - DNA, 160 bp, synthetic construct
  misc_feature 1..160: note = DNA standard
  source 1..160: mol_type = other DNA
tcccgagcacaggggtcggcagcagagaacctcgagacaggggggtttggaccctccaccggggtctcgaaaaggtcctaggtaccgaggagggtcctcctcctcgatgtccaaccccgtccacccgaaggacgacacggacctcgggtctacagtccac

SEQ ID NO: 376 - DNA, 160 bp, synthetic construct; identical to SEQ ID NO: 375
  misc_feature 1..160: note = DNA standard
  source 1..160: mol_type = other DNA

SEQ ID NO: 377 - DNA, 160 bp, synthetic construct
  misc_feature 1..160: note = DNA standard
  source 1..160: mol_type = other DNA
cgactaactaaacaagaacggtaacaagaaagagaagatgcattctctcgagactgtgggttgcttccaaaagaacggcaacgtacgactataagacaacggaacagaaccgatttcctgctattaaaagtagacggctttttcccgttaacaagaaggt

SEQ ID NO: 378 - DNA, 160 bp, synthetic construct
  misc_feature 1..160: note = DNA standard
  source 1..160: mol_type = other DNA
aactaaacaagaacggtaacaagaaagagaagatgcattctctcgagactgtgggttgcttccaaaagaacggcaacgtacgactataagacaacggaacagaaccgatttcctgctattaaaagtagacggctttttcccgttaacaagaaggtggatt

SEQ ID NO: 379 - DNA, 160 bp, synthetic construct
  misc_feature 1..160: note = DNA standard
  source 1..160: mol_type = other DNA
gacctactactacaaaaactacttccagagcagcaggcccagcgtctactttgagaccaagtggtacagaggagggtcgtcgagccagtggtagaggtcgaccagccggcacctcttcgagggcggtggcggcagcaacagaggggcttccctcttccca

SEQ ID NO: 380 - DNA, 160 bp, synthetic construct; identical to SEQ ID NO: 379
  misc_feature 1..160: note = DNA standard
  source 1..160: mol_type = other DNA

SEQ ID NO: 381 - DNA, 160 bp, synthetic construct
  misc_feature 1..160: note = DNA standard
  source 1..160: mol_type = other DNA
ttttccattcccttttagaacagtaccaaccctgaagaaggagataataaccacttaaacccgggaaagacacatctcaatgactttatcactgtcacacgagaatttaatctaaattaataatgtgaagtctacaaagataagatcctttcggtatcgc

SEQ ID NO: 382 - DNA, 160 bp, synthetic construct; identical to SEQ ID NO: 381
  misc_feature 1..160: note = DNA standard
  source 1..160: mol_type = other DNA

SEQ ID NO: 383 - DNA, 160 bp, synthetic construct
  misc_feature 1..160: note = DNA standard
  source 1..160: mol_type = other DNA
ttcttcattttaaggaaacgggagaaacatacgccagagcttccgggtccgatctctgataagacagtgaggaccatagggaagtcttcaacgggcatgccaacggacttcctctccgggacgtcacaaactgtcttgcacgatactcaaccgttctatc

SEQ ID NO: 384 - DNA, 160 bp, synthetic construct
  misc_feature 1..160: note = DNA standard
  source 1..160: mol_type = other DNA
tcttcattttaaggaaacgggagaaacatacgccagagcttccgggtccgatctctgataagacagtgaggaccatagggaagtcttcaacgggcatgccaacggacttcctctccgggacgtcacaaactgtcttgcacgatactcaaccgttctatct

SEQ ID NO: 385 - DNA, 160 bp, synthetic construct
  misc_feature 1..160: note = DNA standard
  source 1..160: mol_type = other DNA
cgcaggtcaccggacccgtacctcccagtatcgacgccagggccatcggaccccgccttcaccctcactgactccgagttaaatggggacacgccaaagtgtgagcggatgaagatcgcctctgctgttgggacgggaggggcccggaaaacagacgggg

SEQ ID NO: 386 - DNA, 160 bp, synthetic construct; identical to SEQ ID NO: 385
  misc_feature 1..160: note = DNA standard
  source 1..160: mol_type = other DNA

SEQ ID NO: 387 - DNA, 160 bp, synthetic construct
  misc_feature 1..160: note = DNA standard
  source 1..160: mol_type = other DNA
gacttactcctcctctggagtggggtcacggtctacctggcgtactaacaggctctctacacgttccttaaggaccacgaccccctccgagggtcgatcgtggaacgacaggagggaagggacgtcgaggtcagtcacacgtcccctgagtccccgaacc

SEQ ID NO: 388 - DNA, 160 bp, synthetic construct; identical to SEQ ID NO: 387
  misc_feature 1..160: note = DNA standard
  source 1..160: mol_type = other DNA

SEQ ID NO: 389 - DNA, 160 bp, synthetic construct
  misc_feature 1..160: note = DNA standard
  source 1..160: mol_type = other DNA
gacctctcttatgtaagacagggaacttcttgaacacttaccgtacatgtcttagatactgtacctcttgcatgacgaaccagagaaaagttgttaggtactaagataggtcatacaggtcttcttacgtcctttcgactggtggtgacactcatggtca

SEQ ID NO: 390 - DNA, 160 bp, synthetic construct; identical to SEQ ID NO: 389
  misc_feature 1..160: note = DNA standard
  source 1..160: mol_type = other DNA

SEQ ID NO: 391 - DNA, 160 bp, synthetic construct
  misc_feature 1..160: note = DNA standard
  source 1..160: mol_type = other DNA
cgtcatagacattggctccattagacgggtgacaaaggagtgaaggtctcctacccggactcgcacataccctccggatccccacagagttagtgggacggagtctgaggtgagaaacgtgtcggtgggggatgaagggtgacttactatttgtggaagt

SEQ ID NO: 392 - DNA, 160 bp, synthetic construct; identical to SEQ ID NO: 391
  misc_feature 1..160: note = DNA standard
  source 1..160: mol_type = other DNA

SEQ ID NO: 393 - DNA, 160 bp, synthetic construct
  misc_feature 1..160: note = DNA standard
  source 1..160: mol_type = other DNA
tcatacctcaagtctggacgggtttttttcccttttcagacctcacgaacgactacccgtcagtatggtcgttgttctcttctgtcgacgtctgttgtctcatgtcttctcctccgtgcaactagaatttatccatatttttatggagggtacgcctgca

SEQ ID NO: 394 - DNA, 160 bp, synthetic construct; identical to SEQ ID NO: 393
  misc_feature 1..160: note = DNA standard
  source 1..160: mol_type = other DNA

SEQ ID NO: 395 - DNA, 160 bp, synthetic construct
  misc_feature 1..160: note = DNA standard
  source 1..160: mol_type = other DNA
acccaaagacacccctctttccctttttatctagtggaaaattattaataacagagtcagtaatctcgtgagacctctctcttgtttatttaccaatggacatttataaacatccagtcttagtagtgttattacgtgtagtacggtcgatgctaatgct

SEQ ID NO: 396 - DNA, 160 bp, synthetic construct
  misc_feature 1..160: note = DNA standard
  source 1..160: mol_type = other DNA
agacacccctctttccctttttatctagtggaaaattattaataacagagtcagtaatctcgtgagacctctctcttgtttatttaccaatggacatttataaacatccagtcttagtagtgttattacgtgtagtacggtcgatgctaatgctttggtt

SEQ ID NO: 397 - DNA, 160 bp, synthetic construct
  misc_feature 1..160: note = DNA standard
  source 1..160: mol_type = other DNA
aagacacccctctttccctttttatctagtggaaaattattaataacagagtcagtaatctcgtgagacctctctcttgtttatttaccaatggacatttataaacatccagtcttagtagtgttattacgtgtagtacggtcgatgctaatgctttggt

SEQ ID NO: 398 - DNA, 160 bp, synthetic construct; identical to SEQ ID NO: 397
  misc_feature 1..160: note = DNA standard
  source 1..160: mol_type = other DNA

SEQ ID NO: 399 - DNA, 160 bp, synthetic construct
  misc_feature 1..160: note = DNA standard
  source 1..160: mol_type = other DNA
atagaagacaagtcccaagtttaggagtagaagtaatcatgacgatcttttatttcattgttgttccagataatccaaaggatatttcattctatacgactaacacgtgttaatatttcgcatttctacctttacttttggtggatatttagaacatttg

SEQ ID NO: 400 - DNA, 160 bp, synthetic construct; identical to SEQ ID NO: 399
  misc_feature 1..160: note = DNA standard
  source 1..160: mol_type = other DNA

SEQ ID NO: 401 - DNA, 160 bp, synthetic construct
  misc_feature 1..160: note = DNA standard
  source 1..160: mol_type = other DNA
aggagtgacaccctgagcgagtgtcccctgtcgcactaaaggaaatccctcggttagagcgtgtccacacttcccctcaaccggtagtcagacccacctctgtcgaaggtccaaggtgacacataagggaaaacccaaaaccaaccttctcgtgactacc

SEQ ID NO: 402 - DNA, 160 bp, synthetic construct; identical to SEQ ID NO: 401
  misc_feature 1..160: note = DNA standard
  source 1..160: mol_type = other DNA

SEQ ID NO: 403 - DNA, 160 bp, synthetic construct
  misc_feature 1..160: note = DNA standard
  source 1..160: mol_type = other DNA
cgggccgcgtcgcggtcggagggcgcgacggtcgcacggggcgacaggtacctccggagcagccggtccgacatcgcgtcgtggcggaggaagtcgcggagcccaccgccgagggcccggtccgaggtcccgtccttgaagaaccggtccggtccggccc

SEQ ID NO: 404 - DNA, 160 bp, synthetic construct; identical to SEQ ID NO: 403
  misc_feature 1..160: note = DNA standard
  source 1..160: mol_type = other DNA

SEQ ID NO: 405 - DNA, 160 bp, synthetic construct
  misc_feature 1..160: note = DNA standard
  source 1..160: mol_type = other DNA
gagtatcttcttttctaaccacactcatatgaaatttgaaaattaaaaatcacatctgggaatctgacatcaatttaattctgcaaataagtttatgtagtttccttttacatagtaatgatcagtcgtaaatatctaaagtactatacatattatctat

SEQ ID NO: 406 - DNA, 160 bp, synthetic construct
  misc_feature 1..160: note = DNA standard
  source 1..160: mol_type = other DNA
atcttcttttctaaccacactcatatgaaatttgaaaattaaaaatcacatctgggaatctgacatcaatttaattctgcaaataagtttatgtagtttccttttacatagtaatgatcagtcgtaaatatctaaagtactatacatattatctatgttg

SEQ ID NO: 407 - DNA, 160 bp, synthetic construct
  misc_feature 1..160: note = DNA standard
  source 1..160: mol_type = other DNA
gagtttctgctactgaagctttcctagagtctcgacccgcgcccgttgccgccccaccagtggtttcaggtcgtgtctgggagcccggagtagtaccggtccttccactcgtgacgccccagcccctccagcccctcaccaccccttccagggggacctt

SEQ ID NO: 408 - DNA, 160 bp, synthetic construct; identical to SEQ ID NO: 407
  misc_feature 1..160: note = DNA standard
  source 1..160: mol_type = other DNA

SEQ ID NO: 409 - DNA, 160 bp, synthetic construct
  misc_feature 1..160: note = DNA standard
  source 1..160: mol_type = other DNA
aactatcgctgcccttaaaattgaaagagtggaagaccctaggtctcagggatactgtctctctcttccttctgcaattgaccgttaacactctaccacggtgtacgacgggtcactagacccacctacaatggtcgctacgtggggcttccactccctg

SEQ ID NO: 410 - DNA, 160 bp, synthetic construct
  misc_feature 1..160: note = DNA standard
  source 1..160: mol_type = other DNA
taaaattgaaagagtggaagaccctaggtctcagggatactgtctctctcttccttctgcaattgaccgttaacactctaccacggtgtacgacgggtcactagacccacctacaatggtcgctacgtggggcttccactccctgtgaccccgacacctc

SEQ ID NO: 411 - DNA, 160 bp, synthetic construct
  misc_feature 1..160: note = DNA standard
  source 1..160: mol_type = other DNA
aggaactatcgctgcccttaaaattgaaagagtggaagaccctaggtctcagggatactgtctctctcttccttctgcaattgaccgttaacactctaccacggtgtacgacgggtcactagacccacctacaatggtcgctacgtggggcttccactcc

SEQ ID NO: 412 - DNA, 160 bp, synthetic construct; identical to SEQ ID NO: 410
  misc_feature 1..160: note = DNA standard
  source 1..160: mol_type = other DNA

SEQ ID NO: 413 - DNA, 160 bp, synthetic construct
  misc_feature 1..160: note = DNA standard
  source 1..160: mol_type = other DNA
cgctgcccttaaaattgaaagagtggaagaccctaggtctcagggatactgtctctctcttccttctgcaattgaccgttaacactctaccacggtgtacgacgggtcactagacccacctacaatggtcgctacgtggggcttccactccctgtgaccc

SEQ ID NO: 414 - DNA, 160 bp, synthetic construct; identical to SEQ ID NO: 410
  misc_feature 1..160: note = DNA standard
  source 1..160: mol_type = other DNA

SEQ ID NO: 415 - DNA, 160 bp, synthetic construct
  misc_feature 1..160: note = DNA standard
  source 1..160: mol_type = other DNA
tatcgctgcccttaaaattgaaagagtggaagaccctaggtctcagggatactgtctctctcttccttctgcaattgaccgttaacactctaccacggtgtacgacgggtcactagacccacctacaatggtcgctacgtggggcttccactccctgtga

SEQ ID NO: 416 - DNA, 160 bp, synthetic construct; identical to SEQ ID NO: 410
  misc_feature 1..160: note = DNA standard
  source 1..160: mol_type = other DNA

SEQ ID NO: 417 - DNA, 160 bp, synthetic construct
  misc_feature 1..160: note = DNA standard
  source 1..160: mol_type = other DNA
gaactatcgctgcccttaaaattgaaagagtggaagaccctaggtctcagggatactgtctctctcttccttctgcaattgaccgttaacactctaccacggtgtacgacgggtcactagacccacctacaatggtcgctacgtggggcttccactccct

SEQ ID NO: 418 - DNA, 160 bp, synthetic construct
  misc_feature 1..160: note = DNA standard
  source 1..160: mol_type = other DNA
aaattgaaagagtggaagaccctaggtctcagggatactgtctctctcttccttctgcaattgaccgttaacactctaccacggtgtacgacgggtcactagacccacctacaatggtcgctacgtggggcttccactccctgtgaccccgacacctcgg

SEQ ID NO: 419 - DNA, 160 bp, synthetic construct
  misc_feature 1..160: note = DNA standard
  source 1..160: mol_type = other DNA
actaagttactgggaggtcgcttaaagtatggagccaaagatatttactggtcctgtccattgaccacttaatggtttcagggtcacgtggtctcgaagtgacttcgtcgtgtcactgacctgtgtcatctcaggttgttgcaagtgaggtgtacattaa

SEQ ID NO: 420 - DNA, 160 bp, synthetic construct
  misc_feature 1..160: note = DNA standard
  source 1..160: mol_type = other DNA
ggtcgcttaaagtatggagccaaagatatttactggtcctgtccattgaccacttaatggtttcagggtcacgtggtctcgaagtgacttcgtcgtgtcactgacctgtgtcatctcaggttgttgcaagtgaggtgtacattaacgactcgaggaagag

SEQ ID NO: 421 - DNA, 160 bp, synthetic construct
  misc_feature 1..160: note = DNA standard
  source 1..160: mol_type = other DNA
cgaggtgccgcgcctcgggttgacgcggctggggcggtgagagtgggctgggcacgtgctgcgacgggccctcccgaaggacctgtgcgaccaccacgacgtggcccggccccgcgccgacctgcacgcgctacggaccccggcagacgggcacctggac

SEQ ID NO: 422 - DNA, 160 bp, synthetic construct; identical to SEQ ID NO: 421
  misc_feature 1..160: note = DNA standard
  source 1..160: mol_type = other DNA

SEQ ID NO: 423 - DNA, 160 bp, synthetic construct
  misc_feature 1..160: note = DNA standard
  source 1..160: mol_type = other DNA
ggccctcccgaaggacctgtgcgaccaccacgacgtggcccggccccgcgccgacctgcacgcgctacggaccccggcagacgggcacctggaccgactcctcgacccggtagcgctacagcgtgccatggacgcgcgccgacgccccccgtggtctccg

SEQ ID NO: 424 - DNA, 160 bp, synthetic construct; identical to SEQ ID NO: 423
  misc_feature 1..160: note = DNA standard
  source 1..160: mol_type = other DNA

SEQ ID NO: 425 - DNA, 160 bp, synthetic construct
  misc_feature 1..160: note = DNA standard
  source 1..160: mol_type = other DNA
gtacccaaagacacccctctttccctttttatctagtggaaaattattaataacagagtcagtaatctcgtgagacctctctcttgtttatttaccaatggacatttataaacatccagtcttagtagtgttattacgtgtagtacggtcgatgctaatg

SEQ ID NO: 426 - DNA, 160 bp, synthetic construct; identical to SEQ ID NO: 425
  misc_feature 1..160: note = DNA standard
  source 1..160: mol_type = other DNA

SEQ ID NO: 427 - DNA, 160 bp, synthetic construct
  misc_feature 1..160: note = DNA standard
  source 1..160: mol_type = other DNA
gagggcccacgtctggggacggttgttctgttgctcctgaagttgtgcaccgaggcgagggttgacttgtttgttgacagatttctttttcggaagacttcctaagactgagacgaggagtcaggacccgggttgaaggttgtaccagggttcgtggacg

SEQ ID NO: 428 - DNA, 160 bp, synthetic construct; identical to SEQ ID NO: 427
  misc_feature 1..160: note = DNA standard
  source 1..160: mol_type = other DNA

SEQ ID NO: 429 - DNA, 160 bp, synthetic construct
  misc_feature 1..160: note = DNA standard
  source 1..160: mol_type = other DNA
tatgtacccaaagacacccctctttccctttttatctagtggaaaattattaataacagagtcagtaatctcgtgagacctctctcttgtttatttaccaatggacatttataaacatccagtcttagtagtgttattacgtgtagtacggtcgatgcta

SEQ ID NO: 430 - DNA, 160 bp, synthetic construct; identical to SEQ ID NO: 429
  misc_feature 1..160: note = DNA standard
  source 1..160: mol_type = other DNA

SEQ ID NO: 431 - DNA, 160 bp, synthetic construct
  misc_feature 1..160: note = DNA standard
  source 1..160: mol_type = other DNA
tcgaacacgaagtaccactacaggcacgcaaggtagagggtgaacagcatcaaccccctgtgtggtatctgtcacccgaacaacgcgaaaccccgacctattacctcgcaccactactcgggcagccggtggcaacttactactacttggttgagccggt

SEQ ID NO: 432 - DNA, 160 bp, synthetic construct; identical to SEQ ID NO: 431
  misc_feature 1..160: note = DNA standard
  source 1..160: mol_type = other DNA

SEQ ID NO: 433 - DNA, 160 bp, synthetic construct
  misc_feature 1..160: note = DNA standard
  source 1..160: mol_type = other DNA
gactagtcatccgttcaaaatggatgtcgagatttctctttctcttttttccaacgaatcagttgtacttacattagaatcgaaagtgataattcaattttattaaagatctcttttttttagttccgtatatgtagtgtatgaatcgtaatttctttta

SEQ ID NO: 434 - DNA, 160 bp, synthetic construct; identical to SEQ ID NO: 433
  misc_feature 1..160: note = DNA standard
  source 1..160: mol_type = other DNA

SEQ ID NO: 435 - DNA, 401 bp, synthetic construct
  misc_feature 1..401: note = Reversed DNA standard
  source 1..401: mol_type = other DNA
taacgaaaggaaaaagtgttctatattgacttatcaggatgtcacaaaagtcaaagtttttatgaattgaggacaatttaatatcaaatgtgactgtggatcgacactaggactttgacttaaaagatatatttgtttttgtctacgagactctttccgtaatctttcggacatcaaaatgaatgagagcagaggtgtctgtgtatgaggtattaaattttggtttacgaacactctttcgaacgagtagtatgaacgacgaagtttctcttatttttttcattctgttcctatattttcgatacaaactgacaacaggtatttatcaagtcttttaagagagacggtattatttctacgtgaaagaggatgaaagtcgtactgatatctactcctatgtt

SEQ ID NO: 436 - DNA, 401 bp, synthetic construct
  misc_feature 1..401: note = Reversed DNA standard
  source 1..401: mol_type = other DNA
taacgaaaggaaaaagtgttctatattgacttatcaggatgtcacaaaagtcaaagtttttatgaattgaggacaatttaatatcaaatgtgactgtggatcgacactaggactttgacttaaaagatatatttgtttttgtctacgagactctttccgtaatctttcggacatcaaaatgaatgagagcagaggtgtctttgtatgaggtattaaattttggtttacgaacactctttcgaacgagtagtatgaacgacgaagtttctcttatttttttcattctgttcctatattttcgatacaaactgacaacaggtatttatcaagtcttttaagagagacggtattatttctacgtgaaagaggatgaaagtcgtactgatatctactcctatgtt

SEQ ID NO: 437 - DNA, 34 bp, synthetic construct
  misc_feature 1..34: note = Reversed and shuffled sequence
  source 1..34: mol_type = other DNA
ttctgattccttttttttttcatgtttcttaaca

SEQ ID NO: 438 - DNA, 34 bp, synthetic construct
  misc_feature 1..34: note = Reversed and shuffled standard
  source 1..34: mol_type = other DNA
cttatttttttcattctgttcctatattttcgat

SEQ ID NO: 439 - DNA, 34 bp, synthetic construct
  misc_feature 1..34: note = Reversed and shuffled sequence
  source 1..34: mol_type = other DNA
gaataaaaaaagtaagacaaggatataaaagcta

SEQ ID NO: 440 - DNA, 401 bp, synthetic construct
  misc_feature 1..401: note = Final reversed standard
  source 1..401: mol_type = other DNA
taacgaaaggaaaaagtgttctatattgacttatcaggatgtcacaaaagtcaaagtttttatgaattgaggacaatttaatatcaaatgtgactgtggatcgacactaggactttgacttaaaagatatatttgtttttgtctacgagactctttccgtaatctttcggacatcaaaatgaatgagagcagaggtgtctgtgtatgaggtattaaattttggtttacgaacactctttcgaacgagtagtatgaacgacgaagtttctttctgattccttttttttttcatgtttcttaacaacaaactgacaacaggtatttatcaagtcttttaagagagacggtattatttctacgtgaaagaggatgaaagtcgtactgatatctactcctatgtt

SEQ ID NO: 441 - DNA, 401 bp, synthetic construct
  misc_feature 1..401: note = Final reversed standard
  source 1..401: mol_type = other DNA
taacgaaaggaaaaagtgttctatattgacttatcaggatgtcacaaaagtcaaagtttttatgaattgaggacaatttaatatcaaatgtgactgtggatcgacactaggactttgacttaaaagatatatttgtttttgtctacgagactctttccgtaatctttcggacatcaaaatgaatgagagcagaggtgtctttgtatgaggtattaaattttggtttacgaacactctttcgaacgagtagtatgaacgacgaagtttctttctgattccttttttttttcatgtttcttaacaacaaactgacaacaggtatttatcaagtcttttaagagagacggtattatttctacgtgaaagaggatgaaagtcgtactgatatctactcctatgtt

SEQ ID NO: 442 - DNA, 401 bp, synthetic construct
  misc_feature 1..401: note = Standard
  source 1..401: mol_type = other DNA
attctcctttctacttcatgatacaaaatttcttataatataatgtcttaatatctttaatctagagaatggatttgagaagtattacgaacgacattctctacttcaatattgatgaaaacagaagggaatgatgtggagtctatataaagaagtacttctggagtgtcatttttatccactaaaaccagatcgatgtcactttagagctacctcacccagggtagtcaaacttgtcaacagacctaggtaaaacacctaccattcttaactccgataaaaaggtgactaatttaaaaaccgggactctacgacgactcaatgatctttcagtaacttccagagttgatatcataaaagtatcaagggtcataagtgtttttagtcacaagaataaaaaa

SEQ ID NO: 443 - DNA, 401 bp, synthetic construct
  misc_feature 1..401: note = Standard
  source 1..401: mol_type = other DNA
attctcctttctacttcatgatacaaaatttcttataatataatgtcttaatatctttaatctagagaatggatttgagaagtattacgaacgacattctctacttcaatattgatgaaaacagaagggaatgatgtggagtctatataaagaagtacttctggagtgtcatttttatccactaaaaccagatcgatgtctctttagagctacctcacccagggtagtcaaacttgtcaacagacctaggtaaaacacctaccattcttaactccgataaaaaggtgactaatttaaaaaccgggactctacgacgactcaatgatctttcagtaacttccagagttgatatcataaaagtatcaagggtcataagtgtttttagtcacaagaataaaaaa

SEQ ID NO: 444 - DNA, 401 bp, synthetic construct
  misc_feature 1..401: note = Standard
  source 1..401: mol_type = other DNA
ttaaaagtactaacttaaaacataatacccaattattaataaatgtatatttccactcaaacataattttccatgaccacctcataaactatcacataattggaatacacactgtacaagattatatcaaatttgtaaaataattagtaaaaagccggacgacttttactgacttatatttgaacaccatcaacctcgaccaccgcatccgttctcacggaactgctatgtcgattaagtcttagtaaaacacctgcttatactaggttgttatctccatttagaacaaaattatacgtataatgaccacgtcctggtaagaaactatgtctatttccaaagagactggtaaaagtactcatgaataatgttctattaatacgactttcaattcaatagac

SEQ ID NO: 445 - DNA, 401 bp, synthetic construct
  misc_feature 1..401: note = Standard
  source 1..401: mol_type = other DNA
ttaaaagtactaacttaaaacataatacccaattattaataaatgtatatttccactcaaacataattttccatgaccacctcataaactatcacataattggaatacacactgtacaagattatatcaaatttgtaaaataattagtaaaaagccggacgacttttactgacttatatttgaacaccatcaacctcgactaccgcatccgttctcacggaactgctatgtcgattaagtcttagtaaaacacctgcttatactaggttgttatctccatttagaacaaaattatacgtataatgaccacgtcctggtaagaaactatgtctatttccaaagagactggtaaaagtactcatgaataatgttctattaatacgactttcaattcaatagac

SEQ ID NO: 446 - DNA, 401 bp, synthetic construct
  misc_feature 1..401: note = Standard
  source 1..401: mol_type = other DNA
cttcgtattacaaccgcagtttacacggtgatagtgaggactactcttctcccaactcctcaagttcaactttgtttacacctttagtggtttaccgtggtatgctttataagacccaccgtgccagaagtctcttcggtaatagacgtttttatagggggccgaacactcacctacccattttggatagtagtatccagcagtacgaatacccctagttcattcagtacaaccgttattacactaaaacgtacaaaaaaaaaagtaccgggtctttaaaggttgaacatacacaaaataagaatagaaaaccatagatgtgggtaattcgttccatactttaactctttacgtatatacatattgacatataaatgtgtgtaaatcgatttccgtttatg

SEQ ID NO: 447 - DNA, 401 bp, synthetic construct
  misc_feature 1..401: note = Standard
  source 1..401: mol_type = other DNA
cttcgtattacaaccgcagtttacacggtgatagtgaggactactcttctcccaactcctcaagttcaactttgtttacacctttagtggtttaccgtggtatgctttataagacccaccgtgccagaagtctcttcggtaatagacgtttttatagggggccgaacactcacctacccattttggatagtagtatccagtagtacgaatacccctagttcattcagtacaaccgttattacactaaaacgtacaaaaaaaaaagtaccgggtctttaaaggttgaacatacacaaaataagaatagaaaaccatagatgtgggtaattcgttccatactttaactctttacgtatatacatattgacatataaatgtgtgtaaatcgatttccgtttatg

SEQ ID NO: 448 - DNA, 401 bp, synthetic construct
  misc_feature 1..401: note = Standard
  source 1..401: mol_type = other DNA
gggtcgacggtcgtcgtcgacgacgctcgagtgggtcttacagacctctcgtaggaggggacgtacacaatttgttatgtcgatcacccttccgtcggaccagggaccacagtccttttacgaccgactggatttcggtggaggaatgaaacggaggaagacgtaccataagaaagagaaggcgtgggtcgtcaaaccggtcgggttttagacactagaactgtacgacgccacaaaagtggtcatgcaaggaccgacggtccagcgccacgtggttcgctgccaggaggttcatcaagtacgggactttgtctcttctgtacctgtgaccccgaactggtagtacccttcttcgagacgtaggcttaagtcccagtacaagtacggtccgagactcggag

SEQ ID NO: 449 - DNA, 401 bp, synthetic construct
  misc_feature 1..401: note = Standard
  source 1..401: mol_type = other DNA
gggtcgacggtcgtcgtcgacgacgctcgagtgggtcttacagacctctcgtaggaggggacgtacacaatttgttatgtcgatcacccttccgtcggaccagggaccacagtccttttacgaccgactggatttcggtggaggaatgaaacggaggaagacgtaccataagaaagagaaggcgtgggtcgtcaaaccgggcgggttttagacactagaactgtacgacgccacaaaagtggtcatgcaaggaccgacggtccagcgccacgtggttcgctgccaggaggttcatcaagtacgggactttgtctcttctgtacctgtgaccccgaactggtagtacccttcttcgagacgtaggcttaagtcccagtacaagtacggtccgagactcggag

SEQ ID NO: 450 - DNA, 401 bp, synthetic construct
  misc_feature 1..401: note = Standard
  source 1..401: mol_type = other DNA
cgtgtgccaccgggtggaactcgtgccattgcatcccacacggcaggcccgggtggaacgacggtaagtggaggtgcacgaactcggtgacctacaccccgacacgcagtgacatgtggaacgtcaccttgaggtgcagcgacgggtcgtggcggcagaccaaccggccgtcggggcggacgtcctacccggccacgcccctcgcgagacacccccgtctactgcgagtccccggtgggggagggagtggtggtggcggtgacggcgggggtgggggcgcggcggggtcccgggagtgggtcgtgcaggtcgcacatgcagacggcctacgacggtttgaacaagaggtgctgcgtccacatcaacggcgccaggctcccgtggtgcgaaaggtactggtc

SEQ ID NO: 451 - DNA, 401 bp, synthetic construct
  misc_feature 1..401: note = Standard
  source 1..401: mol_type = other DNA
cgtgtgccaccgggtggaactcgtgccattgcatcccacacggcaggcccgggtggaacgacggtaagtggaggtgcacgaactcggtgacctacaccccgacacgcagtgacatgtggaacgtcaccttgaggtgcagcgacgggtcgtggcggcagaccaaccggccgtcggggcggacgtcctacccggccacgcccgtcgcgagacacccccgtctactgcgagtccccggtgggggagggagtggtggtggcggtgacggcgggggtgggggcgcggcggggtcccgggagtgggtcgtgcaggtcgcacatgcagacggcctacgacggtttgaacaagaggtgctgcgtccacatcaacggcgccaggctcccgtggtgcgaaaggtactggtc

SEQ ID NO: 452 - DNA, 401 bp, synthetic construct
  misc_feature 1..401: note = Standard
  source 1..401: mol_type = other DNA
aagacaagaacgacatttaagattacgacaagtacctaacacgttaaggatacgttagccagaaacggacgactctcaataattgtcacgtcacaccttaggtctcactcgaaagtaaaagagtcaatagaaaagtcaagttacgtacgacaaattaacacaccttctaggttaggtaaaaacaacaggtcggtggtactacacgtagtaagtaaacaaagtactttatgaggtttcggagaacgagtcaaaatagattccgatcccagaaagcttacatacgttacagtagttttctaacatcaagaccgtaaggtctcggttcgtagtaactcttttctaaatacttctctaaccgtacgacagcttatcgatctattcggaacattgtgtagaggact

SEQ ID NO: 453 - DNA, 401 bp, synthetic construct
  misc_feature 1..401: note = Standard
  source 1..401: mol_type = other DNA
aagacaagaacgacatttaagattacgacaagtacctaacacgttaaggatacgttagccagaaacggacgactctcaataattgtcacgtcacaccttaggtctcactcgaaagtaaaagagtcaatagaaaagtcaagttacgtacgacaaattaacacaccttctaggttaggtaaaaacaacaggtcggtggtactgcacgtagtaagtaaacaaagtactttatgaggtttcggagaacgagtcaaaatagattccgatcccagaaagcttacatacgttacagtagttttctaacatcaagaccgtaaggtctcggttcgtagtaactcttttctaaatacttctctaaccgtacgacagcttatcgatctattcggaacattgtgtagaggact

SEQ ID NO: 454 - DNA, 401 bp, synthetic construct
  misc_feature 1..401: note = Standard
  source 1..401: mol_type = other DNA
ccgtcccgtcttcatgtacctgtccgtctgtctatgtgtgtgtgggtcccggagtcttgtcagaagtcccgtccctgttccggaaccgttccgctcaggtctcactgccgctctttaaagccaaccacatcagcgtctgtcactacttggagtcctacgaccccttgagaaagaagtaacggaacatgaactacccctagtcagcgaagactacccgtggacgttcggttccccacggtacgaccgtagtccgggaacggggtaccaccctgttcgggtcagaagttggggtcccaattgttgtcggtagggggtagattcatggggaccggtttgaattggtgtttatggtccgtgtgtgtacgtgtgtacgagtccacacgtctctagaagtcgtcaag

SEQ ID NO: 455 - DNA, 401 bp, synthetic construct
  misc_feature 1..401: note = Standard
  source 1..401: mol_type = other DNA
ccgtcccgtcttcatgtacctgtccgtctgtctatgtgtgtgtgggtcccggagtcttgtcagaagtcccgtccctgttccggaaccgttccgctcaggtctcactgccgctctttaaagccaaccacatcagcgtctgtcactacttggagtcctacgaccccttgagaaagaagtaacggaacatgaactacccctagccagcgaagactacccgtggacgttcggttccccacggtacgaccgtagtccgggaacggggtaccaccctgttcgggtcagaagttggggtcccaattgttgtcggtagggggtagattcatggggaccggtttgaattggtgtttatggtccgtgtgtgtacgtgtgtacgagtccacacgtctctagaagtcgtcaag

SEQ ID NO: 456 - DNA, 401 bp, synthetic construct
  misc_feature 1..401: note = Standard
  source 1..401: mol_type = other DNA
tcgtatggtacgtttaaaacgacttcatatgaattaaactgacgattttacacactatagggatctgtcctaaatgtaatacttttagtgtcctttgttaaaaatagctttcaactttgatttttaggaaacgtcctgacagttcgtctcttacccatgagtgcaaaggaaattggtgtattaatcttagtaagaactacagagaccgatctggttttagtgtttagaaacactaggctggtactcattcctcctataaagaccgacggttcagagacacttatgtgataatccaacctcctctttttaaattagtatttgcgatttattcagattaaactcacttttgattgaaaaattatgatatcacaacgaatataatattttttaggttatgaaaa

SEQ ID NO: 457 - DNA, 401 bp, synthetic construct
  misc_feature 1..401: note = Standard
  source 1..401: mol_type = other DNA
tcgtatggtacgtttaaaacgacttcatatgaattaaactgacgattttacacactatagggatctgtcctaaatgtaatacttttagtgtcctttgttaaaaatagctttcaactttgatttttaggaaacgtcctgacagttcgtctcttacccatgagtgcaaaggaaattggtgtattaatcttagtaagaactactgagaccgatctggttttagtgtttagaaacactaggctggtactcattcctcctataaagaccgacggttcagagacacttatgtgataatccaacctcctctttttaaattagtatttgcgatttattcagattaaactcacttttgattgaaaaattatgatatcacaacgaatataatattttttaggttatgaaaa

SEQ ID NO: 458 - DNA, 401 bp, synthetic construct
  misc_feature 1..401: note = Standard
  source 1..401: mol_type = other DNA
atttgataatatgtgattgaaaaatcaagagttttgacgtaagactgaaagtcattccgttaagatttatggatttctatgtcgatgaacaagaactcacttcctgactcttttagggacaagggtgagtatgtcctgaaccctccataggtgtaggagaaggagtcctaacggaaatggtgagtctcttcctcgacaccatcaccgtggtcttacctaaggtctcaggtccattctgacaacgacggtcactgattgtcggcgaaaagacagaccaaggtaccggtacaggttgaggtagtttagtcgatatttatgctttgtcataatcgtaatcatctaacctttacacttaatatattatagttttttatagacactatactgggtaactttataaa

SEQ ID NO: 459 - DNA, 401 bp, synthetic construct
  misc_feature 1..401: note = Standard
  source 1..401: mol_type = other DNA
atttgataatatgtgattgaaaaatcaagagttttgacgtaagactgaaagtcattccgttaagatttatggatttctatgtcgatgaacaagaactcacttcctgactcttttagggacaagggtgagtatgtcctgaaccctccataggtgtaggagaaggagtcctaacggaaatggtgagtctcttcctcgacaccgtcaccgtggtcttacctaaggtctcaggtccattctgacaacgacggtcactgattgtcggcgaaaagacagaccaaggtaccggtacaggttgaggtagtttagtcgatatttatgctttgtcataatcgtaatcatctaacctttacacttaatatattatagttttttatagacactatactgggtaactttataaa

SEQ ID NO: 460 - DNA, 401 bp, synthetic construct
  misc_feature 1..401: note = Standard
  source 1..401: mol_type = other DNA
gtctatccgtctttacccgaacttatcaatctacgaataaattggaaccgttatcgtaacgtaagggacaccaaaaattatttttaacttgaagggagggagggacgggtgtaggtagggggggagggtcctaagaatgtcttttgttcaccaatatctaccactttggacaaacaacctgtatgacctatgtcgacctgttcttctcatgtcacggtactctctggttatgtactcctgtccgcttccgaaggagacacataaacggtagttattatcgttcagtaaacgcctataattggagatgtccatgatcctcgtaataaaagagactttcctactagaaacacaagacttagaaatacccctttactccaatggtgtgatcccttctatctcga

SEQ ID NO: 461 - DNA, 401 bp, synthetic construct
  misc_feature 1..401: note = Standard
  source 1..401: mol_type = other DNA
gtctatccgtctttacccgaacttatcaatctacgaataaattggaaccgttatcgtaacgtaagggacaccaaaaattatttttaacttgaagggagggagggacgggtgtaggtagggggggagggtcctaagaatgtcttttgttcaccaatatctaccactttggacaaacaacctgtatgacctatgtcgacctgctcttctcatgtcacggtactctctggttatgtactcctgtccgcttccgaaggagacacataaacggtagttattatcgttcagtaaacgcctataattggagatgtccatgatcctcgtaataaaagagactttcctactagaaacacaagacttagaaatacccctttactccaatggtgtgatcccttctatctcga

SEQ ID NO: 462 - DNA, 401 bp, synthetic construct
  misc_feature 1..401: note = Standard
  source 1..401: mol_type = other DNA
cgtccgcagtctcctcaaccacccacactcacggggacagggacgtgaagcccaccgacgaccaggaggcccaggacgacacaccaatctgccgaaggcccgtcggaccagaccggtcgtgagtgggacgggagagacggaaaagagggggtcccataaaccaaagggtcaggtgatatgactgcagaggttgtactcggcgaaccgctccgtctctgacgacccggccagtacctcgcacggtcagtaggcggtggagaagcgaggcgacttcctcataaaacgcacacacattccctgtacccccgtttgactccatcgcttatttgtttttatgtgttttttgtgttggctttagggtattttgtcttttttttgactcctacctctcttcatagtcg

SEQ ID NO: 463 - DNA, 401 bp, synthetic construct
  misc_feature 1..401: note = Standard
  source 1..401: mol_type = other DNA
cgtccgcagtctcctcaaccacccacactcacggggacagggacgtgaagcccaccgacgaccaggaggcccaggacgacacaccaatctgccgaaggcccgtcggaccagaccggtcgtgagtgggacgggagagacggaaaagagggggtcccataaaccaaagggtcaggtgatatgactgcagaggttgtactcggtgaaccgctccgtctctgacgacccggccagtacctcgcacggtcagtaggcggtggagaagcgaggcgacttcctcataaaacgcacacacattccctgtacccccgtttgactccatcgcttatttgtttttatgtgttttttgtgttggctttagggtattttgtcttttttttgactcctacctctcttcatagtcg

SEQ ID NO: 464 - DNA, 401 bp, synthetic construct
  misc_feature 1..401: note = Standard
  source 1..401: mol_type = other DNA
gcgctctcgcgcctcttctccgagtgcgacaggccgtagatggtcatgtagtagcgcttcaagggcaagatgctcttcttattcttcccgaccgttttatcgtaggcggtgttggagtcggagttgctcacgaagtagttccacggcgcgctcccgccgccgctcgcgttcccgttgatgacctgcgacctgggccggacgcttctgtacaagctcttcccgttgatggccgcggcggcggcgtacttctccgggaaggccggcggcgggcgcgtgaaggtcgggccgttccccgagaagccccggcctccgcggcgtccgcccacgccgcaccgcccgcggccccggctgccgatgccgatggaccgcggggggttcatggacgtcagaccgaaggagtt

SEQ ID NO: 465 - DNA, 401 bp, synthetic construct
  misc_feature 1..401: note = Standard
  source 1..401: mol_type = other DNA
gcgctctcgcgcctcttctccgagtgcgacaggccgtagatggtcatgtagtagcgcttcaagggcaagatgctcttcttattcttcccgaccgttttatcgtaggcggtgttggagtcggagttgctcacgaagtagttccacggcgcgctcccgccgccgctcgcgttcccgttgatgacctgcgacctgggccggacccttctgtacaagctcttcccgttgatggccgcggcggcggcgtacttctccgggaaggccggcggcgggcgcgtgaaggtcgggccgttccccgagaagccccggcctccgcggcgtccgcccacgccgcaccgcccgcggccccggctgccgatgccgatggaccgcggggggttcatggacgtcagaccgaaggagtt

SEQ ID NO: 466 - DNA, 16 bp, synthetic construct
  misc_feature 1..16: note = Deletion sequence
  source 1..16: mol_type = other DNA
gaattaagagaagcaa

SEQ ID NO: 467 - DNA, 401 bp, synthetic construct
  misc_feature 1..401: note = Standard
  source 1..401: mol_type = other DNA
aaatttaccctgtccatcctggactaaaggaatgacggagaacgaagagaaaaggataggactcatcaccattagatgaccctgccttgtcgaaactccacgcacaaacacggacaggaccctctctggccgcgtgtctccttctcttagaggcgttctttcccctcggagtggtgctcgacgggggtccctcgtgattcgctccattcgttcgtcctgttcttcgccacctcctctggttcccacgtcaatacggagtctaagtgaaaatagtggaaaggaacggagaaaggatcgtgacgggttgttgtggtcgaggagaggggtcggtttcttctttggtgacctacctcttataaaggtgaacagccttggtaatagaccctggagaatagttcacc

SEQ ID NO: 468 - DNA, 401 bp, synthetic construct
  misc_feature 1..401: note = Standard
  source 1..401: mol_type = other DNA
aaatttaccctgtccatcctggactaaaggaatgacggagaacgaagagaaaaggataggactcatcaccattagatgaccctgccttgtcgaaactccacgcacaaacacggacaggaccctctctggccgcgtgtctccttctcttagaggcgttctttcccctcggagtggtgctcgacgggggtccctcgtgattcactccattcgttcgtcctgttcttcgccacctcctctggttcccacgtcaatacggagtctaagtgaaaatagtggaaaggaacggagaaaggatcgtgacgggttgttgtggtcgaggagaggggtcggtttcttctttggtgacctacctcttataaaggtgaacagccttggtaatagaccctggagaatagttcacc

SEQ ID NO: 469 - DNA, 13 bp, synthetic construct
  misc_feature 1..13: note = Insertion sequence
  source 1..13: mol_type = other DNA
catacgtgatggc

SEQ ID NO: 470 - DNA, 401 bp, synthetic construct
  misc_feature 1..401: note = Standard
  source 1..401: mol_type = other DNA
cctctctggacgtttctcgggtccacgtatggaaccgttagacgtatgtggtcaagtcgtccaggaccctcgggtccgcaggcgccaaaagggcctgtaccagattctccgtcggtatcccgtattcgacacagtggtcgacgtggcacctacagtccgtctacgggtcttccgccctctgtatacccctcgggtgtggtcggtagtgcatacgaaggacccctgttcccatgcgactctcccataccctctggtgtgtgggggtttgtggtgtgtcggagggttggtagtgtttggtgtcggtaccgggtgtcggacacttccgagtttcatggtcggacctgttgtaccactttgggacagagatgatttttatgtttctaatccggcccgtgccaccg

SEQ ID NO: 471 - DNA, 413 bp, synthetic construct
  misc_feature 1..413: note = Standard
  source 1..413: mol_type = other DNA
cctctctggacgtttctcgggtccacgtatggaaccgttagacgtatgtggtcaagtcgtccaggaccctcgggtccgcaggcgccaaaagggcctgtaccagattctccgtcggtatcccgtattcgacacagtggtcgacgtggcacctacagtccgtctacgggtcttccgccctctgtatacccctcgggtgtggtcggtagtgcatacggtagtgcatacgaaggacccctgttcccatgcgactctcccataccctctggtgtgtgggggtttgtggtgtgtcggagggttggtagtgtttggtgtcggtaccgggtgtcggacacttccgagtttcatggtcggacctgttgtaccactttgggacagagatgatttttatgtttctaatccggcccgtgccaccg

SEQ ID NO: 472 - DNA, 401 bp, synthetic construct; identical to SEQ ID NO: 467
  misc_feature 1..401: note = Standard
  source 1..401: mol_type = other DNA

SEQ ID NO: 473 - DNA, 401 bp, synthetic construct; identical to SEQ ID NO: 468
  misc_feature 1..401: note = Standard
  source 1..401: mol_type = other DNA

SEQ ID NO: 474 - DNA, 401 bp, synthetic construct
  misc_feature 1..401: note = Standard
  source 1..401: mol_type = other DNA
aactttctataaacacaatgattactgacacgatattgaaaaaaaagaaagggtctcttgtttaattttctcaattcctgagacttctacatggataccaggatcatcctttatttacactaaacggaagatcttgtcatctgtgttttgtccgagtcctgaatcgttcttcaatctacataaagatgctttaaagtagtcgtttctgttctgtccattcattgtgactttatttatgtctagacaaaagacgttttagtattgacaatacagtaaattatatagtcaaaaagagagttaatacgatatgatcctttattttgttataaatcatttacaaaaacagagaactctcccgtaacgaagaattaggtcacaggtaccatgacgaaaaccgaaac

SEQ ID NO: 475 - DNA, 401 bp, synthetic construct
  misc_feature 1..401: note = Standard
  source 1..401: mol_type = other DNA
aactttctataaacacaatgattactgacacgatattgaaaaaaaagaaagggtctcttgtttaattttctcaattcctgagacttctacatggataccaggatcatcctttatttacactaaacggaagatcttgtcatctgtgttttgtccgagtcctgaatcgttcttcaatctacataaagatgctttaaagtagttgtttctgttctgtccattcattgtgactttatttatgtctagacaaaagacgttttagtattgacaatacagtaaattatatagtcaaaaagagagttaatacgatatgatcctttattttgttataaatcatttacaaaaacagagaactctcccgtaacgaagaattaggtcacaggtaccatgacgaaaaccgaaac

SEQ ID NO: 476 - DNA, 401 bp, synthetic construct
  misc_feature 1..401: note = Standard
  source 1..401: mol_type = other DNA
ttttctaaaggagagttattgaaccctttttgtgacctcaaagggtttgtgagtcactttgtttctcatttcatctactacctttatatgtcgaacgttcctgagacccgaggggtggtctggtactctccgggacgccgggtcgggtctccggacacggtccctggaatggaatatgtggcacggcttgcgtggcctcgggtcgtgaaactagaaaaacttaagtcaaaggaagttctaggagttctctcgaaccaaccctcgaagaggtgacccacattctccgaggtgttcgaccccccctgttcttgtgtctctgttcccagtggagtcgggagtggtacgacctttcgtcacggtctgtaccgggtcgtccccctggtcgtcggtgccgtacccga

SEQ ID NO: 477 - DNA, 401 bp, synthetic construct
  misc_feature 1..401: note = Standard
  source 1..401: mol_type = other DNA
ttttctaaaggagagttattgaaccctttttgtgacctcaaagggtttgtgagtcactttgtttctcatttcatctactacctttatatgtcgaacgttcctgagacccgaggggtggtctggtactctccgggacgccgggtcgggtctccggacacggtccctggaatggaatatgtggcacggcttgcgtggcctcgagtcgtgaaactagaaaaacttaagtcaaaggaagttctaggagttctctcgaaccaaccctcgaagaggtgacccacattctccgaggtgttcgaccccccctgttcttgtgtctctgttcccagtggagtcgggagtggtacgacctttcgtcacggtctgtaccgggtcgtccccctggtcgtcggtgccgtacccga

SEQ ID NO: 478 - DNA, 401 bp, synthetic construct
  misc_feature 1..401: note = Standard
  source 1..401: mol_type = other DNA
atgaattgttcgatcatgttttactttgaatcactcaaactactgtcataccacactacgtacataatggtctttactgtaccagttacaaccttacttgaattttagtactgactataccatctgtctcggatttgtaggggaatttaacctaatttttctttatatggaaacaacaatggaaatttacgtttcaattttatccgtcttcagaacgggtgtagcaacattcggaatgtaagttggcacggtaacacgaacttacgtgatcttagatatcttgagacttggtgatcgaaaggtttgccaccgggtctactcaaatcacagacgtgtaggtgaccgtcatgtcttcgtctcgtagatttcccttcttttgttttcgggaccgaatgagatcc

SEQ ID NO: 479 - DNA, 407 bp, synthetic construct
  misc_feature 1..407: note = Standard
  source 1..407: mol_type = other DNA
atgaattgttcgatcatgttttactttgaatcactcaaactactgtcataccacactacgtacataatggtctttactgtaccagttacaaccttacttgaattttagtactgactataccatctgtctcggatttgtaggggaatttaacctaatttttctttatatggaaacaacaatggaaatttacgtttcaattttatccgtatccgtcttcagaacgggtgtagcaacattcggaatgtaagttggcacggtaacacgaacttacgtgatcttagatatcttgagacttggtgatcgaaaggtttgccaccgggtctactcaaatcacagacgtgtaggtgaccgtcatgtcttcgtctcgtagatttcccttcttttgttttcgggaccgaatgagatcc

SEQ ID NO: 480 - DNA, 16 bp, synthetic construct
  misc_feature 1..16: note = universal 16S primer
  source 1..16: mol_type = other DNA
ctacgggaggcagcag

SEQ ID NO: 481 - DNA, 21 bp, synthetic construct
  misc_feature 1..21: note = universal 16S primer
  source 1..21: mol_type = other DNA
gactaccagggtatctaatcc

SEQ ID NO: 482 - DNA, 33 bp, synthetic construct
  misc_feature 1..33: note = barcode sequence
  source 1..33: mol_type = other DNA
aattcgctaaggcgagctagaagttagattaga

SEQ ID NO: 483 - DNA, 33 bp, synthetic construct
  misc_feature 1..33: note = barcode sequence
  source 1..33: mol_type = other DNA
aattcgctaaggcgcgatcgaagtcagatttga

SEQ ID NO: 484 - DNA, 33 bp, synthetic construct
  misc_feature 1..33: note = barcode sequence
  source 1..33: mol_type = other DNA
aattcgctaaggcgtagacgaagtgagattcga

SEQ ID NO: 485 - DNA, 33 bp, synthetic construct
  misc_feature 1..33: note = barcode sequence
  source 1..33: mol_type = other DNA
aattcgctaaggcggcagtgaagtaagattgga
